(19) United States
(12) Patent Application Publication
(10) Pub. No.: US 2024/0360233 A1
(43) Pub. Date: Oct. 31, 2024

(54) ANTI-TSLPR (CRLF2) ANTIBODIES

(71) Applicants: BOARD OF REGENTS, THE UNIVERSITY OF TEXAS SYSTEM, Austin, TX (US); XENCOR, INC., Pasadena, CA (US)

(72) Inventors: Dongxing ZHA, Houston, TX (US); Marina KONOPLEVA, Houston, TX (US); Nitin JAIN, Houston, TX (US); Melinda G. SMITH, Houston, TX (US); Ze TIAN, Houston, TX (US); Jason K. ALLEN, Houston, TX (US); Chunhua SHI, Houston, TX (US); Amin AL-SHAMI, Houston, TX (US); Alex NISTHAL, Monrovia, CA (US); John R. DESJARLAIS, Pasadena, CA (US); Seung CHU, Upland, CA (US); Erik PONG, Monrovia, CA (US)

(21) Appl. No.: 18/687,002

(22) PCT Filed: Aug. 27, 2022
(86) PCT No.: PCT/US2022/075552

§ 371 Date: Feb. 27, 2024

Related U.S. Application Data
(60) Provisional application No. 63/366,529, filed on Jun. 16, 2022.
(60) Provisional application No. 63/268,311, filed on Feb. 21, 2022.
(60) Provisional application No. 63/237,857, filed on Aug. 27, 2021.

(51) Int. Cl. C07K 16/28; A61K 39/00; A61P 35/02

(52) U.S. Cl. CPC C07K 16/2866; A61P 35/02; C07K 16/2809; A61K 2039/505; C07K 2317/31; C07K 2317/52; C07K 2317/55; C07K 2317/565; C07K 2317/622; C07K 2317/732

(57) ABSTRACT

The present disclosure provides antibodies and antigen-binding domain compositions capable of binding to thymic stromal lymphopoietin receptor (TSLPR). Also provided are methods of using such antibodies for the treatment of TSLPR-associated cancers (e.g., B-Cell Acute Lymphoblastic Leukemia (B-ALL)). In embodiments, the antibodies are heterodimeric antibodies that bind TSLPR and CD3 epsilon (i.e., anti-TSLPR x anti-CD3e) antibodies.

### BACKGROUND

[0001] The thymic stromal lymphopoietin receptor (TSLPR), a heterodimeric receptor complex comprised of a TSLPR subunit (encoded by the CRLF2 gene) and a CD127 subunit binds the cytokine thymic stromal lymphopoietin (TSLP). Overexpression of the TSLPR has been identified in 5% to 15% of children and adults with B-Cell Acute Lymphoblastic Leukemia (B-ALL) and is associated with poor prognosis. The TSLPR signaling pathway has been identified as biologically important for Acute Lymphoblastic Leukemia (ALL) blasts. Recent comprehensive genomic analyses of high-risk B-ALL cases demonstrated that CRLF2 rearrangements in ALL are frequently associated with a gene expression profile highly similar to that of Philadelphia chromosome (Ph)-positive ALL, but without the BCR-ABL1 fusion. About 20% of B-cell ALL patients have “Philadelphia chromosome-like” (Ph-like) gene expression profiles and about half of Ph-like leukemias are CRLF2-positive. Patients with Ph-like leukemias respond poorly to conventional chemotherapy and have high rates of relapse. Therefore, new treatment modalities for Ph-like B-ALL are needed.

[0002] T cell immune response is an important part of the human immune system, and thus, construction of antibodies that bind to T cells and tumor cell surface antigens can activate inactive T cells to kill a tumor target.

[0003] Although malignant B cells have been targeted with antibodies that bind, e.g., CD19 and CD3 on T cells, clinically meaningful remission rates have not been achieved, potentially because CD19 is downregulated on B-ALL cells over time. Further, CD19 is expressed on normal B cells and bispecific CD19 x CD3 antibodies have been shown to lead to depletion of normal B cells. Therefore, more efficient therapies for B cell malignancies, in general, and Ph-like B-ALL specifically, that target, e.g., TSLPR cell surface antigen, including in combination with T cell activation (e.g., via CD3e), are needed.

### SUMMARY

[0004] The present disclosure provides antibodies and antigen-binding domain compositions capable of binding to thymic stromal lymphopoietin receptor (TSLPR). Also provided are methods of using such antibodies for the treatment of TSLPR-associated cancers (e.g., B-Cell Acute Lymphoblastic Leukemia (B-ALL)). In embodiments, the antibodies are heterodimeric antibodies that bind TSLPR and CD3 epsilon (i.e., anti-TSLPR x anti-CD3e) antibodies.

[0005] In one aspect provided herein is a bispecific antibody comprising: a) a thymic stromal lymphopoietin receptor (TSLPR) binding domain comprising i) a first variable heavy domain (VH1), and ii) a first variable light domain (VL1); and b) a CD3 epsilon (CD3e) binding domain comprising i) a second variable heavy domain (VH2), and ii) a second variable light domain (VL2).

[0006] In embodiments, the VH1 and VL1 are selected from one of the following:
[0007] (1) (i) a VH1 comprising a vhCDR1, a vhCDR2, and a vhCDR3 having an amino acid sequence of a vhCDR1, a vhCDR2, and a vhCDR3, respectively, of a VH having an amino acid sequence of SEQ ID NO:7 or a variant thereof; and (ii) a VL1 comprising a vlCDR1, a vlCDR2, and a vlCDR3 having an amino acid sequence of a vlCDR1, a vlCDR2, and a vlCDR3, respectively, of a VL having an amino acid sequence of SEQ ID NO: 10 or a variant thereof; or
[0008] (2) (i) a VH1 comprising a vhCDR1, a vhCDR2, and a vhCDR3 having an amino acid sequence of a vhCDR1, a vhCDR2, and a vhCDR3, respectively, of a VH having an amino acid sequence of SEQ ID NO:8 or a variant thereof; and (ii) a VL1 comprising a vlCDR1, a vlCDR2, and a vlCDR3 having an amino acid sequence of a vlCDR1, a vlCDR2, and a vlCDR3, respectively, of a VL having an amino acid sequence of SEQ ID NO:11 or a variant thereof; or
[0009] (3) (i) a VH1 comprising a vhCDR1, a vhCDR2, and a vhCDR3 having an amino acid sequence of a vhCDR1, a vhCDR2, and a vhCDR3, respectively, of a VH having an amino acid sequence of SEQ ID NO:9 or a variant thereof; and (ii) a VL1 comprising a vlCDR1, a vlCDR2, and a vlCDR3 having an amino acid sequence of a vlCDR1, a vlCDR2, and a vlCDR3, respectively, of a VL having an amino acid sequence of SEQ ID NO: 12 or a variant thereof; or
[0010] (4) (i) a VH1 comprising a vhCDR1, a vhCDR2, and a vhCDR3 having an amino acid sequence of a vhCDR1, a vhCDR2, and a vhCDR3, respectively, of a VH having an amino acid sequence of SEQ ID NO:76 or a variant thereof; and (ii) a VL1 comprising a vlCDR1, a vlCDR2, and a vlCDR3 having an amino acid sequence of a vlCDR1, a vlCDR2, and a vlCDR3, respectively, of a VL having an amino acid sequence of SEQ ID NO:148 or a variant thereof; or
[0011] (5) (i) a VH1 comprising a vhCDR1, a vhCDR2, and a vhCDR3 having an amino acid sequence of a vhCDR1, a vhCDR2, and a vhCDR3, respectively, of a VH having an amino acid sequence of SEQ ID NO:77 or a variant thereof; and (ii) a VL1 comprising a vlCDR1, a vlCDR2, and a vlCDR3 having an amino acid sequence of a vlCDR1, a vlCDR2, and a vlCDR3, respectively, of a VL having an amino acid sequence of SEQ ID NO:149 or a variant thereof; or
[0012] (6) (i) a VH1 comprising a vhCDR1, a vhCDR2, and a vhCDR3 having an amino acid sequence of a vhCDR1, a vhCDR2, and a vhCDR3, respectively, of a VH having an amino acid sequence of SEQ ID NO:78 or a variant thereof; and (ii) a VL1 comprising a vlCDR1, a vlCDR2, and a vlCDR3 having an amino acid sequence of a vlCDR1, a vlCDR2, and a vlCDR3, respectively, of a VL having an amino acid sequence of SEQ ID NO:150 or a variant thereof; or
[0013] (7) (i) a VH1 comprising a vhCDR1, a vhCDR2, and a vhCDR3 having an amino acid sequence of a vhCDR1, a vhCDR2, and a vhCDR3, respectively, of a VH having an amino acid sequence of SEQ ID NO:79 or a variant thereof; and (ii) a VL1 comprising a vlCDR1, a vlCDR2, and a vlCDR3 having an amino acid sequence of a vlCDR1, a vlCDR2, and a vlCDR3, respectively, of a VL having an amino acid sequence of SEQ ID NO: 151 or a variant thereof; or
[0014] (8) (i) a VH1 comprising a vhCDR1, a vhCDR2, and a vhCDR3 having an amino acid sequence of a vhCDR1, a vhCDR2, and a vhCDR3, respectively, of a VH having an amino acid sequence of SEQ ID NO:80 or a variant thereof; and (ii) a VL1 comprising a vlCDR1, a vlCDR2, and a vlCDR3 having an amino acid sequence of a vlCDR1, a vlCDR2, and a vlCDR3, respectively, of a VL having an amino acid sequence of SEQ ID NO: 152 or a variant thereof; or
[0015] (9) (i) a VH1 comprising a vhCDR1, a vhCDR2, and a vhCDR3 having an amino acid sequence of a vhCDR1, a vhCDR2, and a vhCDR3, respectively, of a VH having an amino acid sequence of SEQ ID NO:81 or a variant thereof; and (ii) a VL1 comprising a vlCDR1, a vlCDR2, and a vlCDR3 having an amino acid sequence of a vlCDR1, a vlCDR2, and a vlCDR3, respectively, of a VL having an amino acid sequence of SEQ ID NO: 153 or a variant thereof; or
[0016] (10) (i) a VH1 comprising a vhCDR1, a vhCDR2, and a vhCDR3 having an amino acid sequence of a vhCDR1, a vhCDR2, and a vhCDR3, respectively, of a VH having an amino acid sequence of SEQ ID NO:82 or a variant thereof; and (ii) a VL1 comprising a vlCDR1, a vlCDR2, and a vlCDR3 having an amino acid sequence of a vlCDR1, a vlCDR2, and a vlCDR3, respectively, of a VL having an amino acid sequence of SEQ ID NO:154 or a variant thereof; or
[0017] (11) (i) a VH1 comprising a vhCDR1, a vhCDR2, and a vhCDR3 having an amino acid sequence of a vhCDR1, a vhCDR2, and a vhCDR3, respectively, of a VH having an amino acid sequence of SEQ ID NO:83 or a variant thereof; and (ii) a VL1 comprising a vlCDR1, a vlCDR2, and a vlCDR3 having an amino acid sequence of a vlCDR1, a vlCDR2, and a vlCDR3, respectively, of a VL having an amino acid sequence of SEQ ID NO: 155 or a variant thereof; or
[0018] (12) (i) a VH1 comprising a vhCDR1, a vhCDR2, and a vhCDR3 having an amino acid sequence of a vhCDR1, a vhCDR2, and a vhCDR3, respectively, of a VH having an amino acid sequence of SEQ ID NO:84 or a variant thereof; and (ii) a VL1 comprising a vlCDR1, a vlCDR2, and a vlCDR3 having an amino acid sequence of a vlCDR1, a vlCDR2, and a vlCDR3, respectively, of a VL having an amino acid sequence of SEQ ID NO:156 or a variant thereof; or
[0019] (13) (i) a VH1 comprising a vhCDR1, a vhCDR2, and a vhCDR3 having an amino acid sequence of a vhCDR1, a vhCDR2, and a vhCDR3, respectively, of a VH having an amino acid sequence of SEQ ID NO:85 or a variant thereof; and (ii) a VL1 comprising a vlCDR1, a vlCDR2, and a vlCDR3 having an amino acid sequence of a vlCDR1, a vlCDR2, and a vlCDR3, respectively, of a VL having an amino acid sequence of SEQ ID NO: 157 or a variant thereof; or
[0020] (14) (i) a VH1 comprising a vhCDR1, a vhCDR2, and a vhCDR3 having an amino acid sequence of a vhCDR1, a vhCDR2, and a vhCDR3, respectively, of a VH having an amino acid sequence of SEQ ID NO:86 or a variant thereof; and (ii) a VL1 comprising a vlCDR1, a vlCDR2, and a vlCDR3 having an amino acid sequence of a vlCDR1, a vlCDR2, and a vlCDR3, respectively, of a VL having an amino acid sequence of SEQ ID NO: 158 or a variant thereof; or
[0021] (15) (i) a VH1 comprising a vhCDR1, a vhCDR2, and a vhCDR3 having an amino acid sequence of a vhCDR1, a vhCDR2, and a vhCDR3, respectively, of a VH having an amino acid sequence of SEQ ID NO:87 or a variant thereof; and (ii) a VL1 comprising a vlCDR1, a vlCDR2, and a vlCDR3 having an amino acid sequence of a vlCDR1, a vlCDR2, and a vlCDR3, respectively, of a VL having an amino acid sequence of SEQ ID NO: 159 or a variant thereof; or
[0022] (16) (i) a VH1 comprising a vhCDR1, a vhCDR2, and a vhCDR3 having an amino acid sequence of a vhCDR1, a vhCDR2, and a vhCDR3, respectively, of a VH having an amino acid sequence of SEQ ID NO:88 or a variant thereof; and (ii) a VL1 comprising a vlCDR1, a vlCDR2, and a vlCDR3 having an amino acid sequence of a vlCDR1, a vlCDR2, and a vlCDR3, respectively, of a VL having an amino acid sequence of SEQ ID NO: 160 or a variant thereof; or
[0023] (17) (i) a VH1 comprising a vhCDR1, a vhCDR2, and a vhCDR3 having an amino acid sequence of a vhCDR1, a vhCDR2, and a vhCDR3, respectively, of a VH having an amino acid sequence of SEQ ID NO:89 or a variant thereof; and (ii) a VL1 comprising a vlCDR1, a vlCDR2, and a vlCDR3 having an amino acid sequence of a vlCDR1, a vlCDR2, and a vlCDR3, respectively, of a VL having an amino acid sequence of SEQ ID NO: 161 or a variant thereof; or
[0024] (18) (i) a VH1 comprising a vhCDR1, a vhCDR2, and a vhCDR3 having an amino acid sequence of a vhCDR1, a vhCDR2, and a vhCDR3, respectively, of a VH having an amino acid sequence of SEQ ID NO:90 or a variant thereof; and (ii) a VL1 comprising a vlCDR1, a vlCDR2, and a vlCDR3 having an amino acid sequence of a vlCDR1, a vlCDR2, and a vlCDR3, respectively, of a VL having an amino acid sequence of SEQ ID NO: 162 or a variant thereof; or
[0025] (19) (i) a VH1 comprising a vhCDR1, a vhCDR2, and a vhCDR3 having an amino acid sequence of a vhCDR1, a vhCDR2, and a vhCDR3, respectively, of a VH having an amino acid sequence of SEQ ID NO:91 or a variant thereof; and (ii) a VL1 comprising a vlCDR1, a vlCDR2, and a vlCDR3 having an amino acid sequence of a vlCDR1, a vlCDR2, and a vlCDR3, respectively, of a VL having an amino acid sequence of SEQ ID NO: 163 or a variant thereof; or
[0026] (20) (i) a VH1 comprising a vhCDR1, a vhCDR2, and a vhCDR3 having an amino acid sequence of a vhCDR1, a vhCDR2, and a vhCDR3, respectively, of a VH having an amino acid sequence of SEQ ID NO:92 or a variant thereof; and (ii) a VL1 comprising a vlCDR1, a vlCDR2, and a vlCDR3 having an amino acid sequence of a vlCDR1, a vlCDR2, and a vlCDR3, respectively, of a VL having an amino acid sequence of SEQ ID NO: 164 or a variant thereof; or
[0027] (21) (i) a VH1 comprising a vhCDR1, a vhCDR2, and a vhCDR3 having an amino acid sequence of a vhCDR1, a vhCDR2, and a vhCDR3, respectively, of a VH having an amino acid sequence of SEQ ID NO:93 or a variant thereof; and (ii) a VL1 comprising a vlCDR1, a vlCDR2, and a vlCDR3 having an amino acid sequence of a vlCDR1, a vlCDR2, and a vlCDR3, respectively, of a VL having an amino acid sequence of SEQ ID NO: 165 or a variant thereof.

[0028] In embodiments, the VH1 and VL1 are selected from the following:
[0029] (1) (i) a VH1 having an amino acid sequence of SEQ ID NO:7 or a variant thereof; and (ii) a VL1 having an amino acid sequence of SEQ ID NO:10 or a variant thereof; or
[0030] (2) (i) a VH1 having an amino acid sequence of SEQ ID NO:8 or a variant thereof; and (ii) a VL1 having an amino acid sequence of SEQ ID NO:11 or a variant thereof; or
[0031] (3) (i) a VH1 having an amino acid sequence of SEQ ID NO:9 or a variant thereof; and (ii) a VL1 having an amino acid sequence of SEQ ID NO:12 or a variant thereof; or
[0032] (4) (i) a VH1 having an amino acid sequence of SEQ ID NO:76 or a variant thereof; and (ii) a VL1 having an amino acid sequence of SEQ ID NO:148 or a variant thereof; or
[0033] (5) (i) a VH1 having an amino acid sequence of SEQ ID NO:77 or a variant thereof; and (ii) a VL1 having an amino acid sequence of SEQ ID NO:149 or a variant thereof; or
[0034] (6) (i) a VH1 having an amino acid sequence of SEQ ID NO:78 or a variant thereof; and (ii) a VL1 having an amino acid sequence of SEQ ID NO:150 or a variant thereof; or
[0035] (7) (i) a VH1 having an amino acid sequence of SEQ ID NO:79 or a variant thereof; and (ii) a VL1 having an amino acid sequence of SEQ ID NO:151 or a variant thereof; or
[0036] (8) (i) a VH1 having an amino acid sequence of SEQ ID NO:80 or a variant thereof; and (ii) a VL1 having an amino acid sequence of SEQ ID NO:152 or a variant thereof; or
[0037] (9) (i) a VH1 having an amino acid sequence of SEQ ID NO:81 or a variant thereof; and (ii) a VL1 having an amino acid sequence of SEQ ID NO:153 or a variant thereof; or
[0038] (10) (i) a VH1 having an amino acid sequence of SEQ ID NO:82 or a variant thereof; and (ii) a VL1 having an amino acid sequence of SEQ ID NO:154 or a variant thereof; or
[0039] (11) (i) a VH1 having an amino acid sequence of SEQ ID NO:83 or a variant thereof; and (ii) a VL1 having an amino acid sequence of SEQ ID NO:155 or a variant thereof; or
[0040] (12) (i) a VH1 having an amino acid sequence of SEQ ID NO:84 or a variant thereof; and (ii) a VL1 having an amino acid sequence of SEQ ID NO:156 or a variant thereof; or
[0041] (13) (i) a VH1 having an amino acid sequence of SEQ ID NO:85 or a variant thereof; and (ii) a VL1 having an amino acid sequence of SEQ ID NO: 157 or a variant thereof; or
[0042] (14) (i) a VH1 having an amino acid sequence of SEQ ID NO:86 or a variant thereof; and (ii) a VL1 having an amino acid sequence of SEQ ID NO: 158 or a variant thereof; or
[0043] (15) (i) a VH1 having an amino acid sequence of SEQ ID NO:87 or a variant thereof; and (ii) a VL1 having an amino acid sequence of SEQ ID NO:159 or a variant thereof; or
[0044] (16) (i) a VH1 having an amino acid sequence of SEQ ID NO:88 or a variant thereof; and (ii) a VL1 having an amino acid sequence of SEQ ID NO:160 or a variant thereof; or
[0045] (17) (i) a VH1 having an amino acid sequence of SEQ ID NO:89 or a variant thereof; and (ii) a VL1 having an amino acid sequence of SEQ ID NO:161 or a variant thereof; or
[0046] (18) (i) a VH1 having an amino acid sequence of SEQ ID NO:90 or a variant thereof; and (ii) a VL1 having an amino acid sequence of SEQ ID NO: 162 or a variant thereof, or
[0047] (19) (i) a VH1 having an amino acid sequence of SEQ ID NO:91 or a variant thereof; and (ii) a VL1 having an amino acid sequence of SEQ ID NO:163 or a variant thereof; or
[0048] (20) (i) a VH1 having an amino acid sequence of SEQ ID NO:92 or a variant thereof; and (ii) a VL1 having an amino acid sequence of SEQ ID NO: 164 or a variant thereof; or
[0049] (21) (i) a VH1 having an amino acid sequence of SEQ ID NO:93 or a variant thereof; and (ii) a VL1 having an amino acid sequence of SEQ ID NO:165 or a variant thereof.

[0050] In embodiments, the VH2 and VL2 are selected from the following:
[0051] (1) (i) a VH2 comprising a vhCDR1, a vhCDR2, and a vhCDR3 having an amino acid sequence of a vhCDR1, a vhCDR2, and a vhCDR3, respectively, of a VH having an amino acid sequence of SEQ ID NO:333; and (ii) a VL2 comprising a vlCDR1, a vlCDR2, and a vlCDR3 having an amino acid sequence of a vlCDR1, a vlCDR2, and a vlCDR3, respectively, of a VL having an amino acid sequence of SEQ ID NO:337; or
[0052] (2) (i) a VH2 comprising a vhCDR1, a vhCDR2, and a vhCDR3 having an amino acid sequence of a vhCDR1, a vhCDR2, and a vhCDR3, respectively, of a VH having an amino acid sequence of SEQ ID NO:344; and (ii) a VL2 comprising a vlCDR1, a vlCDR2, and a vlCDR3 having an amino acid sequence of a vlCDR1, a vlCDR2, and a vlCDR3, respectively, of a VL having an amino acid sequence of SEQ ID NO:348; or
[0053] (3) (i) a VH2 comprising a vhCDR1, a vhCDR2, and a vhCDR3 having an amino acid sequence of a vhCDR1, a vhCDR2, and a vhCDR3, respectively, of a VH having an amino acid sequence of SEQ ID NO:355; and (ii) a VL2 comprising a vlCDR1, a vlCDR2, and a vlCDR3 having an amino acid sequence of a vlCDR1, a vlCDR2, and a vlCDR3, respectively, of a VL having an amino acid sequence of SEQ ID NO:359; or
[0054] (4) (i) a VH2 comprising a vhCDR1, a vhCDR2, and a vhCDR3 having an amino acid sequence of a vhCDR1, a vhCDR2, and a vhCDR3, respectively, of a VH having an amino acid sequence of SEQ ID NO:366; and (ii) a VL2 comprising a vlCDR1, a vlCDR2, and a vlCDR3 having an amino acid sequence of a vlCDR1, a vlCDR2, and a vlCDR3, respectively, of a VL having an amino acid sequence of SEQ ID NO:370; or
[0055] (5) (i) a VH2 comprising a vhCDR1, a vhCDR2, and a vhCDR3 having an amino acid sequence of a vhCDR1, a vhCDR2, and a vhCDR3, respectively, of a VH having an amino acid sequence of SEQ ID NO:377; and (ii) a VL2 comprising a vlCDR1, a vlCDR2, and a vlCDR3 having an amino acid sequence of a vlCDR1, a vlCDR2, and a vlCDR3, respectively, of a VL having an amino acid sequence of SEQ ID NO:381; or
[0056] (6) (i) a VH2 comprising a vhCDR1, a vhCDR2, and a vhCDR3 having an amino acid sequence of a vhCDR1, a vhCDR2, and a vhCDR3, respectively, of a VH having an amino acid sequence of SEQ ID NO:388; and (ii) a VL2 comprising a vlCDR1, a vlCDR2, and a vlCDR3 having an amino acid sequence of a vlCDR1, a vlCDR2, and a vlCDR3, respectively, of a VL having an amino acid sequence of SEQ ID NO:392.

[0057] In embodiments, the VH2 and VL2 are selected from the following:
[0058] (1) (i) a VH2 having an amino acid sequence of SEQ ID NO:333 or a variant thereof; and (ii) a VL2 having an amino acid sequence of SEQ ID NO:337 or a variant thereof; or
[0059] (2) (i) a VH2 having an amino acid sequence of SEQ ID NO:344 or a variant thereof; and (ii) a VL2 having an amino acid sequence of SEQ ID NO:348 or a variant thereof; or
[0060] (3) (i) a VH2 having an amino acid sequence of SEQ ID NO:355 or a variant thereof; and (ii) a VL2 having an amino acid sequence of SEQ ID NO:359 or a variant thereof; or
[0061] (4) (i) a VH2 having an amino acid sequence of SEQ ID NO:366 or a variant thereof; and (ii) a VL2 having an amino acid sequence of SEQ ID NO:370 or a variant thereof; or
[0062] (5) (i) a VH2 having an amino acid sequence of SEQ ID NO:377 or a variant thereof; and (ii) a VL2 having an amino acid sequence of SEQ ID NO:381 or a variant thereof; or
[0063] (6) (i) a VH2 having an amino acid sequence of SEQ ID NO:388 or a variant thereof; and (ii) a VL2 having an amino acid sequence of SEQ ID NO:392 or a variant thereof.

[0064] In embodiments, the bispecific antibody further comprises a first Fc domain and a second Fc domain.

[0065] In embodiments, the first and second Fc domains comprise a set of heterodimerization skew variants selected from the following heterodimerization variants: S364K/E357Q: L368D/K370S; S364K: L368D/K370S; S364K: L368E/K370S; D401K: T411E/K360E/Q362E; and T366W:T366S/L368A/Y407V, wherein numbering is according to EU numbering. In embodiments, the first and second Fc domains comprise heterodimerization skew variants S364K/E357Q: L368D/K370S, wherein numbering is according to EU numbering.

[0066] In embodiments, the first and second Fc domains each comprise one or more ablation variants. In some embodiments, the one or more ablation variants comprise E233P/L234V/L235A/G236del/S267K, wherein numbering is according to EU numbering.

[0067] In embodiments, the one of the first or second monomer further comprises one or more pI variants. In embodiments, the pI variants N208D/Q295E/N384D/Q418E/N421D, wherein numbering is according to EU numbering.

[0068] In one aspect, provided herein is a heterodimeric antibody that includes a first monomer, a second monomer, and a light chain. The first monomer comprises: i) a single chain variable fragment (scFv); and ii) a first Fc domain, wherein the scFv is covalently attached to the N-terminus of the first Fc domain using a domain linker. The second monomer comprises, from N-terminal to C-terminal, a VH1-CH1-hinge-CH2-CH3, wherein VH1 is a first variable heavy domain and CH2-CH3 is a second Fc domain. The light chain comprises, from N-terminal to C-terminal, VL1-CL, wherein VL1 is a first variable light domain and CL is a constant light domain. Further, the scFv comprises a second VH domain (VH2), a scFv linker, and a second variable light domain (VL2), the VH1 and the VL1 together form a first antigen binding domain (ABD) and the VH2 and the VL2 together form a second ABD, and one of the first ABD and second ABD is a thymic stromal lymphopoietin receptor (TSLPR) binding domain and the other of the first ABD and second ABD is a CD3 epsilon (CD3e) binding domain.

[0069] In embodiments, In the scFv comprises, from N-terminal to C-terminal, VH2-scFv linker-VL2. In embodiments, the scFv comprises, from N-terminal to C-terminal, VL2-scFv linker-VH2.

[0070] In embodiments, the first ABD is the TSLPR binding domain and the second ABD is the CD3e binding domain. In embodiments, the VH1 and VL1 are selected from one of the following:
[0071] (1) (i) a VH1 comprising a vhCDR1, a vhCDR2, and a vhCDR3 having an amino acid sequence of a vhCDR1, a vhCDR2, and a vhCDR3, respectively, of a VH having an amino acid sequence of SEQ ID NO:7 or a variant thereof; and (ii) a VL1 comprising a vlCDR1, a vlCDR2, and a vlCDR3 having an amino acid sequence of a vlCDR1, a vlCDR2, and a vlCDR3, respectively, of a VL having an amino acid sequence of SEQ ID NO: 10 or a variant thereof; or
[0072] (2) (i) a VH1 comprising a vhCDR1, a vhCDR2, and a vhCDR3 having an amino acid sequence of a vhCDR1, a vhCDR2, and a vhCDR3, respectively, of a VH having an amino acid sequence of SEQ ID NO:8 or a variant thereof; and (ii) a VL1 comprising a vlCDR1, a vlCDR2, and a vlCDR3 having an amino acid sequence of a vlCDR1, a vlCDR2, and a vlCDR3, respectively, of a VL having an amino acid sequence of SEQ ID NO:11 or a variant thereof; or
[0073] (3) (i) a VH1 comprising a vhCDR1, a vhCDR2, and a vhCDR3 having an amino acid sequence of a vhCDR1, a vhCDR2, and a vhCDR3, respectively, of a VH having an amino acid sequence of SEQ ID NO:9 or a variant thereof; and (ii) a VL1 comprising a vlCDR1, a vlCDR2, and a vlCDR3 having an amino acid sequence of a vlCDR1, a vlCDR2, and a vlCDR3, respectively, of a VL having an amino acid sequence of SEQ ID NO: 12 or a variant thereof; or
[0074] (4) (i) a VH1 comprising a vhCDR1, a vhCDR2, and a vhCDR3 having an amino acid sequence of a vhCDR1, a vhCDR2, and a vhCDR3, respectively, of a VH having an amino acid sequence of SEQ ID NO:76 or a variant thereof; and (ii) a VL1 comprising a vlCDR1, a vlCDR2, and a vlCDR3 having an amino acid sequence of a vlCDR1, a vlCDR2, and a vlCDR3, respectively, of a VL having an amino acid sequence of SEQ ID NO:148 or a variant thereof; or
[0075] (5) (i) a VH1 comprising a vhCDR1, a vhCDR2, and a vhCDR3 having an amino acid sequence of a vhCDR1, a vhCDR2, and a vhCDR3, respectively, of a VH having an amino acid sequence of SEQ ID NO:77 or a variant thereof; and (ii) a VL1 comprising a vlCDR1, a vlCDR2, and a vlCDR3 having an amino acid sequence of a vlCDR1, a vlCDR2, and a vlCDR3, respectively, of a VL having an amino acid sequence of SEQ ID NO:149 or a variant thereof; or
[0076] (6) (i) a VH1 comprising a vhCDR1, a vhCDR2, and a vhCDR3 having an amino acid sequence of a vhCDR1, a vhCDR2, and a vhCDR3, respectively, of a VH having an amino acid sequence of SEQ ID NO:78 or a variant thereof; and (ii) a VL1 comprising a vlCDR1, a vlCDR2, and a vlCDR3 having an amino acid sequence of a vlCDR1, a vlCDR2, and a vlCDR3, respectively, of a VL having an amino acid sequence of SEQ ID NO: 150 or a variant thereof; or
[0077] (7) (i) a VH1 comprising a vhCDR1, a vhCDR2, and a vhCDR3 having an amino acid sequence of a vhCDR1, a vhCDR2, and a vhCDR3, respectively, of a VH having an amino acid sequence of SEQ ID NO:79 or a variant thereof; and (ii) a VL1 comprising a vlCDR1, a vlCDR2, and a vlCDR3 having an amino acid sequence of a vlCDR1, a vlCDR2, and a vlCDR3, respectively, of a VL having an amino acid sequence of SEQ ID NO:151 or a variant thereof; or
[0078] (8) (i) a VH1 comprising a vhCDR1, a vhCDR2, and a vhCDR3 having an amino acid sequence of a vhCDR1, a vhCDR2, and a vhCDR3, respectively, of a VH having an amino acid sequence of SEQ ID NO:80 or a variant thereof; and (ii) a VL1 comprising a vlCDR1, a vlCDR2, and a vlCDR3 having an amino acid sequence of a vlCDR1, a vlCDR2, and a vlCDR3, respectively, of a VL having an amino acid sequence of SEQ ID NO:152 or a variant thereof; or
[0079] (9) (i) a VH1 comprising a vhCDR1, a vhCDR2, and a vhCDR3 having an amino acid sequence of a vhCDR1, a vhCDR2, and a vhCDR3, respectively, of a VH having an amino acid sequence of SEQ ID NO:81 or a variant thereof; and (ii) a VL1 comprising a vlCDR1, a vlCDR2, and a vlCDR3 having an amino acid sequence of a vlCDR1, a vlCDR2, and a vlCDR3, respectively, of a VL having an amino acid sequence of SEQ ID NO:153 or a variant thereof; or
[0080] (10) (i) a VH1 comprising a vhCDR1, a vhCDR2, and a vhCDR3 having an amino acid sequence of a vhCDR1, a vhCDR2, and a vhCDR3, respectively, of a VH having an amino acid sequence of SEQ ID NO:82 or a variant thereof; and (ii) a VL1 comprising a vlCDR1, a vlCDR2, and a vlCDR3 having an amino acid sequence of a vlCDR1, a vlCDR2, and a vlCDR3, respectively, of a VL having an amino acid sequence of SEQ ID NO: 154 or a variant thereof; or
[0081] (11) (i) a VH1 comprising a vhCDR1, a vhCDR2, and a vhCDR3 having an amino acid sequence of a vhCDR1, a vhCDR2, and a vhCDR3, respectively, of a VH having an amino acid sequence of SEQ ID NO:83 or a variant thereof; and (ii) a VL1 comprising a vlCDR1, a vlCDR2, and a vlCDR3 having an amino acid sequence of a vlCDR1, a vlCDR2, and a vlCDR3, respectively, of a VL having an amino acid sequence of SEQ ID NO: 155 or a variant thereof; or
[0082] (12) (i) a VH1 comprising a vhCDR1, a vhCDR2, and a vhCDR3 having an amino acid sequence of a vhCDR1, a vhCDR2, and a vhCDR3, respectively, of a VH having an amino acid sequence of SEQ ID NO:84 or a variant thereof; and (ii) a VL1 comprising a vlCDR1, a vlCDR2, and a vlCDR3 having an amino acid sequence of a vlCDR1, a vlCDR2, and a vlCDR3, respectively, of a VL having an amino acid sequence of SEQ ID NO: 156 or a variant thereof; or
[0083] (13) (i) a VH1 comprising a vhCDR1, a vhCDR2, and a vhCDR3 having an amino acid sequence of a vhCDR1, a vhCDR2, and a vhCDR3, respectively, of a VH having an amino acid sequence of SEQ ID NO:85 or a variant thereof; and (ii) a VL1 comprising a vlCDR1, a vlCDR2, and a vlCDR3 having an amino acid sequence of a vlCDR1, a vlCDR2, and a vlCDR3, respectively, of a VL having an amino acid sequence of SEQ ID NO: 157 or a variant thereof; or
[0084] (14) (i) a VH1 comprising a vhCDR1, a vhCDR2, and a vhCDR3 having an amino acid sequence of a vhCDR1, a vhCDR2, and a vhCDR3, respectively, of a VH having an amino acid sequence of SEQ ID NO:86 or a variant thereof; and (ii) a VL1 comprising a vlCDR1, a vlCDR2, and a vlCDR3 having an amino acid sequence of a vlCDR1, a vlCDR2, and a vlCDR3, respectively, of a VL having an amino acid sequence of SEQ ID NO: 158 or a variant thereof, or
[0085] (15) (i) a VH1 comprising a vhCDR1, a vhCDR2, and a vhCDR3 having an amino acid sequence of a vhCDR1, a vhCDR2, and a vhCDR3, respectively, of a VH having an amino acid sequence of SEQ ID NO:87 or a variant thereof; and (ii) a VL1 comprising a vlCDR1, a vlCDR2, and a vlCDR3 having an amino acid sequence of a vlCDR1, a vlCDR2, and a vlCDR3, respectively, of a VL having an amino acid sequence of SEQ ID NO: 159 or a variant thereof; or
[0086] (16) (i) a VH1 comprising a vhCDR1, a vhCDR2, and a vhCDR3 having an amino acid sequence of a vhCDR1, a vhCDR2, and a vhCDR3, respectively, of a VH having an amino acid sequence of SEQ ID NO:88 or a variant thereof; and (ii) a VL1 comprising a vlCDR1, a vlCDR2, and a vlCDR3 having an amino acid sequence of a vlCDR1, a vlCDR2, and a vlCDR3, respectively, of a VL having an amino acid sequence of SEQ ID NO: 160 or a variant thereof; or
[0087] (17) (i) a VH1 comprising a vhCDR1, a vhCDR2, and a vhCDR3 having an amino acid sequence of a vhCDR1, a vhCDR2, and a vhCDR3, respectively, of a VH having an amino acid sequence of SEQ ID NO:89 or a variant thereof; and (ii) a VL1 comprising a vlCDR1, a vlCDR2, and a vlCDR3 having an amino acid sequence of a vlCDR1, a vlCDR2, and a vlCDR3, respectively, of a VL having an amino acid sequence of SEQ ID NO: 161 or a variant thereof; or
[0088] (18) (i) a VH1 comprising a vhCDR1, a vhCDR2, and a vhCDR3 having an amino acid sequence of a vhCDR1, a vhCDR2, and a vhCDR3, respectively, of a VH having an amino acid sequence of SEQ ID NO:90 or a variant thereof; and (ii) a VL1 comprising a vlCDR1, a vlCDR2, and a vlCDR3 having an amino acid sequence of a vlCDR1, a vlCDR2, and a vlCDR3, respectively, of a VL having an amino acid sequence of SEQ ID NO: 162 or a variant thereof; or
[0089] (19) (i) a VH1 comprising a vhCDR1, a vhCDR2, and a vhCDR3 having an amino acid sequence of a vhCDR1, a vhCDR2, and a vhCDR3, respectively, of a VH having an amino acid sequence of SEQ ID NO:91 or a variant thereof; and (ii) a VL1 comprising a vlCDR1, a vlCDR2, and a vlCDR3 having an amino acid sequence of a vlCDR1, a vlCDR2, and a vlCDR3, respectively, of a VL having an amino acid sequence of SEQ ID NO: 163 or a variant thereof; or
[0090] (20) (i) a VH1 comprising a vhCDR1, a vhCDR2, and a vhCDR3 having an amino acid sequence of a vhCDR1, a vhCDR2, and a vhCDR3, respectively, of a VH having an amino acid sequence of SEQ ID NO:92 or a variant thereof; and (ii) a VL1 comprising a vlCDR1, a vlCDR2, and a vlCDR3 having an amino acid sequence of a vlCDR1, a vlCDR2, and a vlCDR3, respectively, of a VL having an amino acid sequence of SEQ ID NO: 164 or a variant thereof; or
[0091] (21) (i) a VH1 comprising a vhCDR1, a vhCDR2, and a vhCDR3 having an amino acid sequence of a vhCDR1, a vhCDR2, and a vhCDR3, respectively, of a VH having an amino acid sequence of SEQ ID NO:93 or a variant thereof; and (ii) a VL1 comprising a vlCDR1, a vlCDR2, and a vlCDR3 having an amino acid sequence of a vlCDR1, a vlCDR2, and a vlCDR3, respectively, of a VL having an amino acid sequence of SEQ ID NO:165 or a variant thereof.

[0092] In embodiments, the VH1 and VL1 are selected from the following:
[0093] (1) (i) a VH1 having an amino acid sequence of SEQ ID NO:7 or a variant thereof; and (ii) a VL1 having an amino acid sequence of SEQ ID NO:10 or a variant thereof; or
[0094] (2) (i) a VH1 having an amino acid sequence of SEQ ID NO:8 or a variant thereof; and (ii) a VL1 having an amino acid sequence of SEQ ID NO:11 or a variant thereof; or
[0095] (3) (i) a VH1 having an amino acid sequence of SEQ ID NO:9 or a variant thereof; and (ii) a VL1 having an amino acid sequence of SEQ ID NO:12 or a variant thereof; or
[0096] (4) (i) a VH1 having an amino acid sequence of SEQ ID NO:76 or a variant thereof; and (ii) a VL1 having an amino acid sequence of SEQ ID NO:148 or a variant thereof; or
[0097] (5) (i) a VH1 having an amino acid sequence of SEQ ID NO:77 or a variant thereof; and (ii) a VL1 having an amino acid sequence of SEQ ID NO:149 or a variant thereof; or
[0098] (6) (i) a VH1 having an amino acid sequence of SEQ ID NO:78 or a variant thereof; and (ii) a VL1 having an amino acid sequence of SEQ ID NO: 150 or a variant thereof; or
[0099] (7) (i) a VH1 having an amino acid sequence of SEQ ID NO:79 or a variant thereof; and (ii) a VL1 having an amino acid sequence of SEQ ID NO:151 or a variant thereof; or
[0100] (8) (i) a VH1 having an amino acid sequence of SEQ ID NO:80 or a variant thereof; and (ii) a VL1 having an amino acid sequence of SEQ ID NO: 152 or a variant thereof; or
[0101] (9) (i) a VH1 having an amino acid sequence of SEQ ID NO:81 or a variant thereof; and (ii) a VL1 having an amino acid sequence of SEQ ID NO:153 or a variant thereof; or
[0102] (10) (i) a VH1 having an amino acid sequence of SEQ ID NO:82 or a variant thereof; and (ii) a VL1 having an amino acid sequence of SEQ ID NO:154 or a variant thereof; or
[0103] (11) (i) a VH1 having an amino acid sequence of SEQ ID NO:83 or a variant thereof; and (ii) a VL1 having an amino acid sequence of SEQ ID NO:155 or a variant thereof; or
[0104] (12) (i) a VH1 having an amino acid sequence of SEQ ID NO:84 or a variant thereof; and (ii) a VL1 having an amino acid sequence of SEQ ID NO:156 or a variant thereof; or
[0105] (13) (i) a VH1 having an amino acid sequence of SEQ ID NO:85 or a variant thereof; and (ii) a VL1 having an amino acid sequence of SEQ ID NO:157 or a variant thereof; or
[0106] (14) (i) a VH1 having an amino acid sequence of SEQ ID NO:86 or a variant thereof; and (ii) a VL1 having an amino acid sequence of SEQ ID NO:158 or a variant thereof; or
[0107] (15) (i) a VH1 having an amino acid sequence of SEQ ID NO:87 or a variant thereof; and (ii) a VL1 having an amino acid sequence of SEQ ID NO:159 or a variant thereof; or
[0108] (16) (i) a VH1 having an amino acid sequence of SEQ ID NO:88 or a variant thereof; and (ii) a VL1 having an amino acid sequence of SEQ ID NO:160 or a variant thereof; or
[0109] (17) (i) a VH1 having an amino acid sequence of SEQ ID NO:89 or a variant thereof; and (ii) a VL1 having an amino acid sequence of SEQ ID NO:161 or a variant thereof; or
[0110] (18) (i) a VH1 having an amino acid sequence of SEQ ID NO:90 or a variant thereof; and (ii) a VL1 having an amino acid sequence of SEQ ID NO:162 or a variant thereof; or
[0111] (19) (i) a VH1 having an amino acid sequence of SEQ ID NO:91 or a variant thereof; and (ii) a VL1 having an amino acid sequence of SEQ ID NO:163 or a variant thereof; or
[0112] (20) (i) a VH1 having an amino acid sequence of SEQ ID NO:92 or a variant thereof; and (ii) a VL1 having an amino acid sequence of SEQ ID NO:164 or a variant thereof; or
[0113] (21) (i) a VH1 having an amino acid sequence of SEQ ID NO:93 or a variant thereof; and (ii) a VL1 having an amino acid sequence of SEQ ID NO: 165 or a variant thereof.

[0114] In embodiments, the VH2 and VL2 are selected from one of the following:
[0115] (1) (i) a VH2 comprising a vhCDR1, a vhCDR2, and a vhCDR3 having an amino acid sequence of a vhCDR1, a vhCDR2, and a vhCDR3, respectively, of a VH having an amino acid sequence of SEQ ID NO:333; and (ii) a VL2 comprising a vlCDR1, a vlCDR2, and a vlCDR3 having an amino acid sequence of a vlCDR1, a vlCDR2, and a vlCDR3, respectively, of a VL having an amino acid sequence of SEQ ID NO:337; or
[0116] (2) (i) a VH2 comprising a vhCDR1, a vhCDR2, and a vhCDR3 having an amino acid sequence of a vhCDR1, a vhCDR2, and a vhCDR3, respectively, of a VH having an amino acid sequence of SEQ ID NO:344; and (ii) a VL2 comprising a vlCDR1, a vlCDR2, and a vlCDR3 having an amino acid sequence of a vlCDR1, a vlCDR2, and a vlCDR3, respectively, of a VL having an amino acid sequence of SEQ ID NO:348; or
[0117] (3) (i) a VH2 comprising a vhCDR1, a vhCDR2, and a vhCDR3 having an amino acid sequence of a vhCDR1, a vhCDR2, and a vhCDR3, respectively, of a VH having an amino acid sequence of SEQ ID NO:355; and (ii) a VL2 comprising a vlCDR1, a vlCDR2, and a vlCDR3 having an amino acid sequence of a vlCDR1, a vlCDR2, and a vlCDR3, respectively, of a VL having an amino acid sequence of SEQ ID NO:359; or
[0118] (4) (i) a VH2 comprising a vhCDR1, a vhCDR2, and a vhCDR3 having an amino acid sequence of a vhCDR1, a vhCDR2, and a vhCDR3, respectively, of a VH having an amino acid sequence of SEQ ID NO:366; and (ii) a VL2 comprising a vlCDR1, a vlCDR2, and a vlCDR3 having an amino acid sequence of a vlCDR1, a vlCDR2, and a vlCDR3, respectively, of a VL having an amino acid sequence of SEQ ID NO:370; or
[0119] (5) (i) a VH2 comprising a vhCDR1, a vhCDR2, and a vhCDR3 having an amino acid sequence of a vhCDR1, a vhCDR2, and a vhCDR3, respectively, of a VH having an amino acid sequence of SEQ ID NO:377; and (ii) a VL2 comprising a vlCDR1, a vlCDR2, and a vlCDR3 having an amino acid sequence of a vlCDR1, a vlCDR2, and a vlCDR3, respectively, of a VL having an amino acid sequence of SEQ ID NO:381; or
[0120] (6) (i) a VH2 comprising a vhCDR1, a vhCDR2, and a vhCDR3 having an amino acid sequence of a vhCDR1, a vhCDR2, and a vhCDR3, respectively, of a VH having an amino acid sequence of SEQ ID NO:388; and (ii) a VL2 comprising a vlCDR1, a vlCDR2, and a vlCDR3 having an amino acid sequence of a vlCDR1, a vlCDR2, and a vlCDR3, respectively, of a VL having an amino acid sequence of SEQ ID NO:392.

[0121] In embodiments, VH2 and VL2 are selected from one of the following:
[0122] (1) (i) a VH2 having an amino acid sequence of SEQ ID NO:333 or a variant thereof; and (ii) a VL2 having an amino acid sequence of SEQ ID NO:337 or a variant thereof; or
[0123] (2) (i) a VH2 having an amino acid sequence of SEQ ID NO:344 or a variant thereof; and (ii) a VL2 having an amino acid sequence of SEQ ID NO:348 or a variant thereof; or
[0124] (3) (i) a VH2 having an amino acid sequence of SEQ ID NO:355 or a variant thereof; and (ii) a VL2 having an amino acid sequence of SEQ ID NO:359 or a variant thereof; or
[0125] (4) (i) a VH2 having an amino acid sequence of SEQ ID NO:366 or a variant thereof; and (ii) a VL2 having an amino acid sequence of SEQ ID NO:370 or a variant thereof; or
[0126] (5) (i) a VH2 having an amino acid sequence of SEQ ID NO:377 or a variant thereof; and (ii) a VL2 having an amino acid sequence of SEQ ID NO:381 or a variant thereof; or
[0127] (6) (i) a VH2 having an amino acid sequence of SEQ ID NO:388 or a variant thereof; and (ii) a VL2 having an amino acid sequence of SEQ ID NO:392 or a variant thereof.

[0128] In embodiments, the bispecific antibody further comprises a first Fc domain and a second Fc domain.

[0129] In embodiments, the first and second Fc domains comprise a set of heterodimerization skew variants selected from the following heterodimerization variants: S364K/E357Q: L368D/K370S; S364K: L368D/K370S; S364K: L368E/K370S; D401K: T411E/K360E/Q362E; and T366W:T366S/L368A/Y407V, wherein numbering is according to EU numbering. In embodiments, the first and second Fc domains comprise heterodimerization skew variants S364K/E357Q: L368D/K370S, wherein numbering is according to EU numbering.

[0130] In embodiments, the first and second Fc domains each comprise one or more ablation variants. In some embodiments, the one or more ablation variants comprise E233P/L234V/L235A/G236del/S267K, wherein numbering is according to EU numbering.

[0131] In embodiments, the one of the first or second monomer further comprises one or more pI variants. In embodiments, the pI variants N208D/Q295E/N384D/Q418E/N421D, wherein numbering is according to EU numbering.

[0132] In embodiments, the CH1-hinge-CH2-CH3 of the second monomer comprises amino acid variants E233P/L234V/L235A/G236del/S267K/L368D/K370S/N208D/Q295E/N384D/Q418E/N421 D, and the first Fc domain comprises amino acid variants E233P/L234V/L235A/G236del/S267K/S364K/E357Q, wherein numbering is according to EU numbering.

[0133] In embodiments, the first and second variant Fc domains each further comprise amino acid variants 428L/434S. In embodiments, the scFv linker is GKPGSGKPGSGKPGSGKPGS.

[0134] In one aspect, provided herein is a heterodimeric antibody that includes a first monomer, a second monomer, and a light chain. The first monomer comprises, from N-terminal to C-terminal, VH1-CH1-first domain linker-scFv-second domain linker-CH2-CH3, wherein VH1 is a first variable heavy domain, and CH2-CH3 is a first Fc domain. The second monomer comprises, from N-terminal to C-terminal, a VH1-CH1-hinge-CH2-CH3, wherein CH2-CH3 is a second Fc domain. The light chain comprises, from N-terminal to C-terminal, VL1-CL, wherein VL1 is a first variable light domain and CL is a constant light domain. Further, the scFv comprises a second VH domain (VH2), a scFv linker, and a second variable light domain (VL2), each of the VH1s and the VL1 together form a first antigen binding domain (ABD), and the VH2 and the VL2 form a second ABD, and one of the first ABDs and second ABD is a thymic stromal lymphopoietin receptor (TSLPR) binding domain and the other of the first ABDs and second ABD is a CD3 epsilon (CD3e) binding domain.

[0135] In embodiments, the scFv comprises, from N-terminal to C-terminal, VH2-scFv linker-VL2. In embodiments, the scFv comprises, from N-terminal to C-terminal, VL2-scFv linker-VH2.

[0136] In embodiments, the first ABDs are the TSLPR binding domains and the second ABD is the CD3e binding domain.

[0137] In embodiments, the VH1s and VL1s are selected from one of the following:
[0138] (1) (i) a VH1 comprising a vhCDR1, a vhCDR2, and a vhCDR3 having an amino acid sequence of a vhCDR1, a vhCDR2, and a vhCDR3, respectively, of a VH having an amino acid sequence of SEQ ID NO:7 or a variant thereof; and (ii) a VL1 comprising a vlCDR1, a vlCDR2, and a vlCDR3 having an amino acid sequence of a vlCDR1, a vlCDR2, and a vlCDR3, respectively, of a VL having an amino acid sequence of SEQ ID NO: 10 or a variant thereof; or
[0139] (2) (i) a VH1 comprising a vhCDR1, a vhCDR2, and a vhCDR3 having an amino acid sequence of a vhCDR1, a vhCDR2, and a vhCDR3, respectively, of a VH having an amino acid sequence of SEQ ID NO:8 or a variant thereof; and (ii) a VL1 comprising a vlCDR1, a vlCDR2, and a vlCDR3 having an amino acid sequence of a vlCDR1, a vlCDR2, and a vlCDR3, respectively, of a VL having an amino acid sequence of SEQ ID NO: 11 or a variant thereof; or
[0140] (3) (i) a VH1 comprising a vhCDR1, a vhCDR2, and a vhCDR3 having an amino acid sequence of a vhCDR1, a vhCDR2, and a vhCDR3, respectively, of a VH having an amino acid sequence of SEQ ID NO:9 or a variant thereof; and (ii) a VL1 comprising a vlCDR1, a vlCDR2, and a vlCDR3 having an amino acid sequence of a vlCDR1, a vlCDR2, and a vlCDR3, respectively, of a VL having an amino acid sequence of SEQ ID NO: 12 or a variant thereof; or
[0141] (4) (i) a VH1 comprising a vhCDR1, a vhCDR2, and a vhCDR3 having an amino acid sequence of a vhCDR1, a vhCDR2, and a vhCDR3, respectively, of a VH having an amino acid sequence of SEQ ID NO:76 or a variant thereof; and (ii) a VL1 comprising a vlCDR1, a vlCDR2, and a vlCDR3 having an amino acid sequence of a vlCDR1, a vlCDR2, and a vlCDR3, respectively, of a VL having an amino acid sequence of SEQ ID NO: 148 or a variant thereof; or
[0142] (5) (i) a VH1 comprising a vhCDR1, a vhCDR2, and a vhCDR3 having an amino acid sequence of a vhCDR1, a vhCDR2, and a vhCDR3, respectively, of a VH having an amino acid sequence of SEQ ID NO:77 or a variant thereof; and (ii) a VL1 comprising a vlCDR1, a vlCDR2, and a vlCDR3 having an amino acid sequence of a vlCDR1, a vlCDR2, and a vlCDR3, respectively, of a VL having an amino acid sequence of SEQ ID NO:149 or a variant thereof; or
[0143] (6) (i) a VH1 comprising a vhCDR1, a vhCDR2, and a vhCDR3 having an amino acid sequence of a vhCDR1, a vhCDR2, and a vhCDR3, respectively, of a VH having an amino acid sequence of SEQ ID NO:78 or a variant thereof; and (ii) a VL1 comprising a vlCDR1, a vlCDR2, and a vlCDR3 having an amino acid sequence of a vlCDR1, a vlCDR2, and a vlCDR3, respectively, of a VL having an amino acid sequence of SEQ ID NO:150 or a variant thereof; or
[0144] (7) (i) a VH1 comprising a vhCDR1, a vhCDR2, and a vhCDR3 having an amino acid sequence of a vhCDR1, a vhCDR2, and a vhCDR3, respectively, of a VH having an amino acid sequence of SEQ ID NO:79 or a variant thereof; and (ii) a VL1 comprising a vlCDR1, a vlCDR2, and a vlCDR3 having an amino acid sequence of a vlCDR1, a vlCDR2, and a vlCDR3, respectively, of a VL having an amino acid sequence of SEQ ID NO: 151 or a variant thereof; or
[0145] (8) (i) a VH1 comprising a vhCDR1, a vhCDR2, and a vhCDR3 having an amino acid sequence of a vhCDR1, a vhCDR2, and a vhCDR3, respectively, of a VH having an amino acid sequence of SEQ ID NO:80 or a variant thereof; and (ii) a VL1 comprising a vlCDR1, a vlCDR2, and a vlCDR3 having an amino acid sequence of a vlCDR1, a vlCDR2, and a vlCDR3, respectively, of a VL having an amino acid sequence of SEQ ID NO: 152 or a variant thereof; or
[0146] (9) (i) a VH1 comprising a vhCDR1, a vhCDR2, and a vhCDR3 having an amino acid sequence of a vhCDR1, a vhCDR2, and a vhCDR3, respectively, of a VH having an amino acid sequence of SEQ ID NO:81 or a variant thereof; and (ii) a VL1 comprising a vlCDR1, a vlCDR2, and a vlCDR3 having an amino acid sequence of a vlCDR1, a vlCDR2, and a vlCDR3, respectively, of a VL having an amino acid sequence of SEQ ID NO: 153 or a variant thereof; or
[0147] (10) (i) a VH1 comprising a vhCDR1, a vhCDR2, and a vhCDR3 having an amino acid sequence of a vhCDR1, a vhCDR2, and a vhCDR3, respectively, of a VH having an amino acid sequence of SEQ ID NO:82 or a variant thereof; and (ii) a VL1 comprising a vlCDR1, a vlCDR2, and a vlCDR3 having an amino acid sequence of a vlCDR1, a vlCDR2, and a vlCDR3, respectively, of a VL having an amino acid sequence of SEQ ID NO: 154 or a variant thereof; or
[0148] (11) (i) a VH1 comprising a vhCDR1, a vhCDR2, and a vhCDR3 having an amino acid sequence of a vhCDR1, a vhCDR2, and a vhCDR3, respectively, of a VH having an amino acid sequence of SEQ ID NO:83 or a variant thereof; and (ii) a VL1 comprising a vlCDR1, a vlCDR2, and a vlCDR3 having an amino acid sequence of a vlCDR1, a vlCDR2, and a vlCDR3, respectively, of a VL having an amino acid sequence of SEQ ID NO: 155 or a variant thereof; or
[0149] (12) (i) a VH1 comprising a vhCDR1, a vhCDR2, and a vhCDR3 having an amino acid sequence of a vhCDR1, a vhCDR2, and a vhCDR3, respectively, of a VH having an amino acid sequence of SEQ ID NO:84 or a variant thereof; and (ii) a VL1 comprising a vlCDR1, a vlCDR2, and a vlCDR3 having an amino acid sequence of a vlCDR1, a vlCDR2, and a vlCDR3, respectively, of a VL having an amino acid sequence of SEQ ID NO: 156 or a variant thereof; or
[0150] (13) (i) a VH1 comprising a vhCDR1, a vhCDR2, and a vhCDR3 having an amino acid sequence of a vhCDR1, a vhCDR2, and a vhCDR3, respectively, of a VH having an amino acid sequence of SEQ ID NO:85 or a variant thereof; and (ii) a VL1 comprising a vlCDR1, a vlCDR2, and a vlCDR3 having an amino acid sequence of a vlCDR1, a vlCDR2, and a vlCDR3, respectively, of a VL having an amino acid sequence of SEQ ID NO: 157 or a variant thereof; or
[0151] (14) (i) a VH1 comprising a vhCDR1, a vhCDR2, and a vhCDR3 having an amino acid sequence of a vhCDR1, a vhCDR2, and a vhCDR3, respectively, of a VH having an amino acid sequence of SEQ ID NO:86 or a variant thereof; and (ii) a VL1 comprising a vlCDR1, a vlCDR2, and a vlCDR3 having an amino acid sequence of a vlCDR1, a vlCDR2, and a vlCDR3, respectively, of a VL having an amino acid sequence of SEQ ID NO: 158 or a variant thereof; or
[0152] (15) (i) a VH1 comprising a vhCDR1, a vhCDR2, and a vhCDR3 having an amino acid sequence of a vhCDR1, a vhCDR2, and a vhCDR3, respectively, of a VH having an amino acid sequence of SEQ ID NO:87 or a variant thereof; and (ii) a VL1 comprising a vlCDR1, a vlCDR2, and a vlCDR3 having an amino acid sequence of a vlCDR1, a vlCDR2, and a vlCDR3, respectively, of a VL having an amino acid sequence of SEQ ID NO: 159 or a variant thereof; or
[0153] (16) (i) a VH1 comprising a vhCDR1, a vhCDR2, and a vhCDR3 having an amino acid sequence of a vhCDR1, a vhCDR2, and a vhCDR3, respectively, of a VH having an amino acid sequence of SEQ ID NO:88 or a variant thereof; and (ii) a VL1 comprising a vlCDR1, a vlCDR2, and a vlCDR3 having an amino acid sequence of a vlCDR1, a vlCDR2, and a vlCDR3, respectively, of a VL having an amino acid sequence of SEQ ID NO: 160 or a variant thereof; or
[0154] (17) (i) a VH1 comprising a vhCDR1, a vhCDR2, and a vhCDR3 having an amino acid sequence of a vhCDR1, a vhCDR2, and a vhCDR3, respectively, of a VH having an amino acid sequence of SEQ ID NO:89 or a variant thereof; and (ii) a VL1 comprising a vlCDR1, a vlCDR2, and a vlCDR3 having an amino acid sequence of a vlCDR1, a vlCDR2, and a vlCDR3, respectively, of a VL having an amino acid sequence of SEQ ID NO:161 or a variant thereof; or
[0155] (18) (i) a VH1 comprising a vhCDR1, a vhCDR2, and a vhCDR3 having an amino acid sequence of a vhCDR1, a vhCDR2, and a vhCDR3, respectively, of a VH having an amino acid sequence of SEQ ID NO:90 or a variant thereof; and (ii) a VL1 comprising a vlCDR1, a vlCDR2, and a vlCDR3 having an amino acid sequence of a vlCDR1, a vlCDR2, and a vlCDR3, respectively, of a VL having an amino acid sequence of SEQ ID NO: 162 or a variant thereof; or
[0156] (19) (i) a VH1 comprising a vhCDR1, a vhCDR2, and a vhCDR3 having an amino acid sequence of a vhCDR1, a vhCDR2, and a vhCDR3, respectively, of a VH having an amino acid sequence of SEQ ID NO:91 or a variant thereof; and (ii) a VL1 comprising a vlCDR1, a vlCDR2, and a vlCDR3 having an amino acid sequence of a vlCDR1, a vlCDR2, and a vlCDR3, respectively, of a VL having an amino acid sequence of SEQ ID NO: 163 or a variant thereof; or
[0157] (20) (i) a VH1 comprising a vhCDR1, a vhCDR2, and a vhCDR3 having an amino acid sequence of a vhCDR1, a vhCDR2, and a vhCDR3, respectively, of a VH having an amino acid sequence of SEQ ID NO:92 or a variant thereof; and (ii) a VL1 comprising a vlCDR1, a vlCDR2, and a vlCDR3 having an amino acid sequence of a vlCDR1, a vlCDR2, and a vlCDR3, respectively, of a VL having an amino acid sequence of SEQ ID NO: 164 or a variant thereof; or
[0158] (21) (i) a VH1 comprising a vhCDR1, a vhCDR2, and a vhCDR3 having an amino acid sequence of a vhCDR1, a vhCDR2, and a vhCDR3, respectively, of a VH having an amino acid sequence of SEQ ID NO:93 or a variant thereof; and (ii) a VL1 comprising a vlCDR1, a vlCDR2, and a vlCDR3 having an amino acid sequence of a vlCDR1, a vlCDR2, and a vlCDR3, respectively, of a VL having an amino acid sequence of SEQ ID NO: 165 or a variant thereof.

[0159] In embodiments, the VH1s and VL1s are selected from the following:
[0160] (1) (i) a VH1 having an amino acid sequence of SEQ ID NO:7 or a variant thereof; and (ii) a VL1 having an amino acid sequence of SEQ ID NO:10 or a variant thereof; or
[0161] (2) (i) a VH1 having an amino acid sequence of SEQ ID NO:8 or a variant thereof; and (ii) a VL1 having an amino acid sequence of SEQ ID NO:11 or a variant thereof; or
[0162] (3) (i) a VH1 having an amino acid sequence of SEQ ID NO:9 or a variant thereof; and (ii) a VL1 having an amino acid sequence of SEQ ID NO: 12 or a variant thereof; or
[0163] (4) (i) a VH1 having an amino acid sequence of SEQ ID NO:76 or a variant thereof; and (ii) a VL1 having an amino acid sequence of SEQ ID NO:148 or a variant thereof; or
[0164] (5) (i) a VH1 having an amino acid sequence of SEQ ID NO:77 or a variant thereof; and (ii) a VL1 having an amino acid sequence of SEQ ID NO: 149 or a variant thereof; or
[0165] (6) (i) a VH1 having an amino acid sequence of SEQ ID NO:78 or a variant thereof; and (ii) a VL1 having an amino acid sequence of SEQ ID NO:150 or a variant thereof; or
[0166] (7) (i) a VH1 having an amino acid sequence of SEQ ID NO:79 or a variant thereof; and (ii) a VL1 having an amino acid sequence of SEQ ID NO:151 or a variant thereof; or
[0167] (8) (i) a VH1 having an amino acid sequence of SEQ ID NO:80 or a variant thereof; and (ii) a VL1 having an amino acid sequence of SEQ ID NO: 152 or a variant thereof; or
[0168] (9) (i) a VH1 having an amino acid sequence of SEQ ID NO:81 or a variant thereof; and (ii) a VL1 having an amino acid sequence of SEQ ID NO:153 or a variant thereof; or
[0169] (10) (i) a VH1 having an amino acid sequence of SEQ ID NO:82 or a variant thereof; and (ii) a VL1 having an amino acid sequence of SEQ ID NO:154 or a variant thereof; or
[0170] (11) (i) a VH1 having an amino acid sequence of SEQ ID NO:83 or a variant thereof; and (ii) a VL1 having an amino acid sequence of SEQ ID NO: 155 or a variant thereof; or
[0171] (12) (i) a VH1 having an amino acid sequence of SEQ ID NO:84 or a variant thereof; and (ii) a VL1 having an amino acid sequence of SEQ ID NO:156 or a variant thereof; or
[0172] (13) (i) a VH1 having an amino acid sequence of SEQ ID NO:85 or a variant thereof; and (ii) a VL1 having an amino acid sequence of SEQ ID NO: 157 or a variant thereof; or
[0173] (14) (i) a VH1 having an amino acid sequence of SEQ ID NO:86 or a variant thereof; and (ii) a VL1 having an amino acid sequence of SEQ ID NO: 158 or a variant thereof; or
[0174] (15) (i) a VH1 having an amino acid sequence of SEQ ID NO:87 or a variant thereof; and (ii) a VL1 having an amino acid sequence of SEQ ID NO:159 or a variant thereof; or
[0175] (16) (i) a VH1 having an amino acid sequence of SEQ ID NO:88 or a variant thereof; and (ii) a VL1 having an amino acid sequence of SEQ ID NO: 160 or a variant thereof; or
[0176] (17) (i) a VH1 having an amino acid sequence of SEQ ID NO:89 or a variant thereof; and (ii) a VL1 having an amino acid sequence of SEQ ID NO: 161 or a variant thereof; or
[0177] (18) (i) a VH1 having an amino acid sequence of SEQ ID NO:90 or a variant thereof; and (ii) a VL1 having an amino acid sequence of SEQ ID NO:162 or a variant thereof; or
[0178] (19) (i) a VH1 having an amino acid sequence of SEQ ID NO:91 or a variant thereof; and (ii) a VL1 having an amino acid sequence of SEQ ID NO: 163 or a variant thereof; or
[0179] (20) (i) a VH1 having an amino acid sequence of SEQ ID NO:92 or a variant thereof; and (ii) a VL1 having an amino acid sequence of SEQ ID NO:164 or a variant thereof; or
[0180] (21) (i) a VH1 having an amino acid sequence of SEQ ID NO:93 or a variant thereof; and (ii) a VL1 having an amino acid sequence of SEQ ID NO:165 or a variant thereof.

[0181] In embodiments, the VH2 and VL2 are selected from one of the following:
[0182] (1) (i) a VH2 comprising a vhCDR1, a vhCDR2, and a vhCDR3 having an amino acid sequence of a vhCDR1, a vhCDR2, and a vhCDR3, respectively, of a VH having an amino acid sequence of SEQ ID NO:333; and (ii) a VL2 comprising a vlCDR1, a vlCDR2, and a vlCDR3 having an amino acid sequence of a vlCDR1, a vlCDR2, and a vlCDR3, respectively, of a VL having an amino acid sequence of SEQ ID NO:337; or
[0183] (2) (i) a VH2 comprising a vhCDR1, a vhCDR2, and a vhCDR3 having an amino acid sequence of a vhCDR1, a vhCDR2, and a vhCDR3, respectively, of a VH having an amino acid sequence of SEQ ID NO:344; and (ii) a VL2 comprising a vlCDR1, a vlCDR2, and a vlCDR3 having an amino acid sequence of a vlCDR1, a vlCDR2, and a vlCDR3, respectively, of a VL having an amino acid sequence of SEQ ID NO:348; or
[0184] (3) (i) a VH2 comprising a vhCDR1, a vhCDR2, and a vhCDR3 having an amino acid sequence of a vhCDR1, a vhCDR2, and a vhCDR3, respectively, of a VH having an amino acid sequence of SEQ ID NO:355; and (ii) a VL2 comprising a vlCDR1, a vlCDR2, and a vlCDR3 having an amino acid sequence of a vlCDR1, a vlCDR2, and a vlCDR3, respectively, of a VL having an amino acid sequence of SEQ ID NO:359; or
[0185] (4) (i) a VH2 comprising a vhCDR1, a vhCDR2, and a vhCDR3 having an amino acid sequence of a vhCDR1, a vhCDR2, and a vhCDR3, respectively, of a VH having an amino acid sequence of SEQ ID NO:366; and (ii) a VL2 comprising a vlCDR1, a vlCDR2, and a vlCDR3 having an amino acid sequence of a vlCDR1, a vlCDR2, and a vlCDR3, respectively, of a VL having an amino acid sequence of SEQ ID NO:370; or
[0186] (5) (i) a VH2 comprising a vhCDR1, a vhCDR2, and a vhCDR3 having an amino acid sequence of a vhCDR1, a vhCDR2, and a vhCDR3, respectively, of a VH having an amino acid sequence of SEQ ID NO:377; and (ii) a VL2 comprising a vlCDR1, a vlCDR2, and a vlCDR3 having an amino acid sequence of a vlCDR1, a vlCDR2, and a vlCDR3, respectively, of a VL having an amino acid sequence of SEQ ID NO:381; or
[0187] (6) (i) a VH2 comprising a vhCDR1, a vhCDR2, and a vhCDR3 having an amino acid sequence of a vhCDR1, a vhCDR2, and a vhCDR3, respectively, of a VH having an amino acid sequence of SEQ ID NO:388; and (ii) a VL2 comprising a vlCDR1, a vlCDR2, and a vlCDR3 having an amino acid sequence of a vlCDR1, a vlCDR2, and a vlCDR3, respectively, of a VL having an amino acid sequence of SEQ ID NO:392.

[0188] In embodiments, the VH2 and VL2 are selected from one of the following:
[0189] (1) (i) a VH2 having an amino acid sequence of SEQ ID NO:333 or a variant thereof; and (ii) a VL2 having an amino acid sequence of SEQ ID NO:337 or a variant thereof; or
[0190] (2) (i) a VH2 having an amino acid sequence of SEQ ID NO:344 or a variant thereof; and (ii) a VL2 having an amino acid sequence of SEQ ID NO:348 or a variant thereof; or
[0191] (3) (i) a VH2 having an amino acid sequence of SEQ ID NO:355 or a variant thereof; and (ii) a VL2 having an amino acid sequence of SEQ ID NO:359 or a variant thereof; or
[0192] (4) (i) a VH2 having an amino acid sequence of SEQ ID NO:366 or a variant thereof; and (ii) a VL2 having an amino acid sequence of SEQ ID NO:370 or a variant thereof; or
[0193] (5) (i) a VH2 having an amino acid sequence of SEQ ID NO:377 or a variant thereof; and (ii) a VL2 having an amino acid sequence of SEQ ID NO:381 or a variant thereof; or
[0194] (6) (i) a VH2 having an amino acid sequence of SEQ ID NO:388 or a variant thereof; and (ii) a VL2 having an amino acid sequence of SEQ ID NO:392 or a variant thereof.

[0195] In embodiments, the bispecific antibody further comprises a first Fc domain and a second Fc domain.

[0196] In embodiments, the first and second Fc domains comprise a set of heterodimerization skew variants selected from the following heterodimerization variants: S364K/E357Q: L368D/K370S; S364K: L368D/K370S; S364K: L368E/K370S; D401K: T411E/K360E/Q362E; and T366W:T366S/L368A/Y407V, wherein numbering is according to EU numbering. In embodiments, the first and second Fc domains comprise heterodimerization skew variants S364K/E357Q: L368D/K370S, wherein numbering is according to EU numbering.

[0197] In embodiments, the first and second Fc domains each comprise one or more ablation variants. In some embodiments, the one or more ablation variants comprise E233P/L234V/L235A/G236del/S267K, wherein numbering is according to EU numbering.

[0198] In embodiments, the one of the first or second monomer further comprises one or more pI variants. In embodiments, the pI variants N208D/Q295E/N384D/Q418E/N421D, wherein numbering is according to EU numbering.

[0199] In embodiments, the CH1-hinge-CH2-CH3 of the second monomer comprises amino acid variants E233P/L234V/L235A/G236del/S267K/L368D/K370S/N208D/Q295E/N384D/Q418E/N421 D, and the first Fc domain comprises amino acid variants E233P/L234V/L235A/G236del/S267K/S364K/E357Q, wherein numbering is according to EU numbering.

[0200] In embodiments, the first and second variant Fc domains each further comprise amino acid variants 428L/434S. In embodiments, the scFv linker is GKPGSGKPGSGKPGSGKPGS.

[0201] Also provided herein are nucleic acid compositions comprising nucleic acids encoding the antibodies described herein, expression vector compositions that include such nucleic acids, host cells for making the antibodies that comprise the expression vector compositions, and methods of making the antibodies.

[0202] In another aspect, provided herein is a method of treating a TSLPR-associated in a patient in need thereof, comprising administering to the patient an anti-TSLPR x anti-CD3e antibody described herein. In embodiments, the TSLPR-associated cancer is a leukemia one of the following leukemias: an Acute Lymphoblastic Leukemia, a B-cell Acute Lymphoblastic Leukemia, or a Philadelphia chromosome-like B Cell Acute Lymphoblastic Leukemia.

[0203] In some aspects, the antibody or antigen-binding fragment thereof capable of binding to TSLPR, comprises a heavy chain variable region that comprises an amino acid sequence selected from the group consisting of SEQ ID NO: 13, 40, 41, 16, 64, 65, 19, 52, 53, and combinations thereof; an amino acid sequence selected from the group consisting of SEQ ID NO: 14, 42, 43, 17, 66, 67, 20, 54, 55, and combinations thereof; and an amino acid sequence selected from the group consisting of SEQ ID NO: 15, 44, 45, 18, 68, 69, 21, 56, 57, and combinations thereof; and a light chain variable region that comprises an amino acid sequence selected from the group consisting of SEQ ID NO: 22, 46, 47, 25, 70, 71, 28, 58, 59 and combinations thereof; an amino acid sequence selected from the group consisting of SEQ ID NO: 23, 48, 49, 26, 72, 73, 29, 60, 61 and combinations thereof; and an amino acid sequence selected from the group consisting of SEQ ID NO: 24, 50, 51, 27, 74, 75, 30, 62, 63 and combinations thereof.

[0204] In some aspects, the antibody or antigen-binding fragment thereof comprises
[0205] a heavy chain variable region that comprises an amino acid sequence having SEQ ID NO: 13, 14, and 15, and a light chain variable region that comprises an amino acid sequence having SEQ ID NO: 22, 23, and 24.

[0206] In some aspects, the antibody or antigen-binding fragment thereof comprises a heavy chain variable region that comprises an amino acid sequence having SEQ ID NO: 40, 42, and 44, and a light chain variable region that comprises an amino acid sequence having SEQ ID NO: 46, 48, and 50.

[0207] In some aspects, the antibody or antigen-binding fragment thereof comprises a heavy chain variable region that comprises an amino acid sequence having SEQ ID NO: 41, 43, and 45, and the light chain variable region comprises an amino acid sequence having SEQ ID NO: 47, 49, and 51.

[0208] In some aspects, the antibody or antigen-binding fragment thereof comprises a heavy chain variable region that comprises an amino acid sequence having SEQ ID NO: 16, 17, and 18, and the light chain variable region comprises an amino acid sequence having SEQ ID NO: 25, 26, and 27.

[0209] In some aspects, the antibody or antigen-binding fragment thereof comprises a heavy chain variable region that comprises an amino acid sequence having SEQ ID NO: 64, 66, and 68, and the light chain variable region comprises an amino acid sequence having SEQ ID NO: 70, 72, and 74.

[0210] In some aspects, the antibody or antigen-binding fragment thereof comprises a heavy chain variable region that comprises an amino acid sequence having SEQ ID NO: 65, 67, and 69, and the light chain variable region comprises an amino acid sequence having SEQ ID NO: 71, 73, and 75.

[0211] In some aspects, the antibody or antigen-binding fragment thereof comprises a heavy chain variable region that comprises an amino acid sequence having SEQ ID NO: 19, 20, and 21, and the light chain variable region comprises an amino acid sequence having SEQ ID NO: 28, 29, and 30.

[0212] In some aspects, the antibody or antigen-binding fragment thereof comprises a heavy chain variable region that comprises an amino acid sequence having SEQ ID NO: 52, 54, and 56, and the light chain variable region comprises an amino acid sequence having SEQ ID NO: 58, 60, and 62.

[0213] In some aspects, the antibody or antigen-binding fragment thereof comprises a heavy chain variable region that comprises an amino acid sequence having SEQ ID NO: 53, 55, and 57, and the light chain variable region comprises an amino acid sequence having SEQ ID NO: 59, 61, and 63.

[0214] In some aspects, the antibody or antigen-binding fragment thereof comprises a heavy chain variable region (VH) and a light chain variable region (VL), wherein the VH comprises an amino acid sequence having at least 85%, at least 90%, at least 91% at least 92%, at least 93%, at least 94%, at least 95%, at least 96%, at least 97%, at least 98%, at least 99%, or at least 100% sequence identity to SEQ ID NO: 7 and the VL comprises an amino acid sequence having at least 85%, at least 90%, at least 91%, at least 92%, at least 93%, at least 94%, at least 95%, at least 96%, at least 97%, at least 98%, at least 99%, or at least 100% sequence identity to SEQ ID NO: 10.

[0215] In some aspects, the antibody or antigen-binding fragment thereof comprises a heavy chain variable region (VH) and a light chain variable region (VL), wherein the VH comprises an amino acid sequence having at least 85%, at least 90%, at least 91% at least 92%, at least 93%, at least 94%, at least 95%, at least 96%, at least 97%, at least 98%, at least 99%, or at least 100% sequence identity to SEQ ID NO: 8 and the VL comprises an amino acid sequence having at least 85%, at least 90%, at least 91%, at least 92%, at least 93%, at least 94%, at least 95%, at least 96%, at least 97%, at least 98%, at least 99%, or at least 100% sequence identity to SEQ ID NO: 11.

[0216] In some aspects, the antibody or antigen-binding fragment thereof comprises a heavy chain variable region (VH) and a light chain variable region (VL), wherein the VH comprises an amino acid sequence having at least 85%, at least 90%, at least 91% at least 92%, at least 93%, at least 94%, at least 95%, at least 96%, at least 97%, at least 98%, at least 99%, or at least 100% sequence identity to SEQ ID NO: 9 and the VL comprises an amino acid sequence having at least 85%, at least 90%, at least 91%, at least 92%, at least 93%, at least 94%, at least 95%, at least 96%, at least 97%, at least 98%, at least 99%, or at least 100% sequence identity to SEQ ID NO: 12.

[0217] In some aspects, the antibody or antigen-binding fragment thereof capable of binding to TSLPR comprises a CDR H1, CDR H2, and CDR H3 comprising the CDR H1, CDR H2, and CDR H3 amino acid sequences of any one of SEQ ID NO: 7, SEQ ID NO: 8, or SEQ ID NO: 9 and a CDR L1, CDR L2, and CDR L3 comprising the CDR L1, CDR L2, and CDR L3 amino acid sequences of any one of SEQ ID NO: 10, SEQ ID NO: 11, or SEQ ID NO: 12.

[0218] In some aspects, the antibody or antigen-binding fragment thereof comprises CDRs that are Kabat-defined CDRs, AbM-defined CDRs, or IMGT-defined CDRs.

[0219] In some aspects, the antibody or antigen-binding fragment thereof comprises a heavy chain, wherein the heavy chain variable region comprises an amino acid sequence that is at least 80% identical to SEQ ID NO: 7, SEQ ID NO: 8, or SEQ ID NO: 9.

[0220] In some aspects, the antibody or antigen-binding fragment thereof comprises a heavy chain, wherein the heavy chain variable region comprises an amino acid sequence that is at least 85% identical to SEQ ID NO: 7, SEQ ID NO: 8, or SEQ ID NO: 9.

[0221] In some aspects, the antibody or antigen-binding fragment thereof comprises a heavy chain, wherein the heavy chain variable region comprises an amino acid sequence that is at least 90% identical to SEQ ID NO: 7, SEQ ID NO: 8, or SEQ ID NO: 9.

[0222] In some aspects, the antibody or antigen-binding fragment thereof comprises a heavy chain, wherein the heavy chain variable region comprises an amino acid sequence that is at least 95% identical to SEQ ID NO: 7, SEQ ID NO: 8, or SEQ ID NO: 9.

[0223] In some aspects, the antibody or antigen-binding fragment thereof comprises a heavy chain, wherein the heavy chain variable region comprises an amino acid sequence that is at least 98% identical to SEQ ID NO: 7, SEQ ID NO: 8, or SEQ ID NO: 9.

[0224] In some aspects, the antibody or antigen-binding fragment thereof comprises a heavy chain, wherein the heavy chain variable region comprises an amino acid sequence that is at least 99% identical to SEQ ID NO: 7, SEQ ID NO: 8, or SEQ ID NO: 9.

[0225] In some aspects, the antibody or antigen-binding fragment thereof comprises a heavy chain, wherein the heavy chain variable region comprises an amino acid sequence having SEQ ID NO: 7, SEQ ID NO: 8, or SEQ ID NO: 9.

[0226] In some aspects, the antibody or antigen-binding fragment thereof comprises a light chain, wherein the light chain variable region comprises an amino acid sequence that is at least 80% identical to SEQ ID NO: 10, SEQ ID NO: 11, or SEQ ID NO: 12.

[0227] In some aspects, the antibody or antigen-binding fragment thereof comprises a light chain, wherein the light chain variable region comprises an amino acid sequence that is at least 85% identical to SEQ ID NO: 10, SEQ ID NO: 11, or SEQ ID NO: 12.

[0228] In some aspects, the antibody or antigen-binding fragment thereof comprises a light chain, wherein the light chain variable region comprises an amino acid sequence that is at least 90% identical to SEQ ID NO: 10, SEQ ID NO: 11, or SEQ ID NO: 12.

[0229] In some aspects, the antibody or antigen-binding fragment thereof comprises a light chain, wherein the light chain variable region comprises an amino acid sequence that is at least 95% identical to SEQ ID NO: 10, SEQ ID NO: 11, or SEQ ID NO: 12.

[0230] In some aspects, the antibody or antigen-binding fragment thereof comprises a light chain, wherein the light chain variable region comprises an amino acid sequence that is at least 98% identical to SEQ ID NO: 10, SEQ ID NO: 11, or SEQ ID NO: 12.

[0231] In some aspects, the antibody or antigen-binding fragment thereof comprises a light chain, wherein the light chain variable region comprises an amino acid sequence that is at least 99% identical to SEQ ID NO: 10, SEQ ID NO: 11, or SEQ ID NO: 12.

[0232] In some aspects, the antibody or antigen-binding fragment thereof comprises a light chain, wherein the light chain variable region comprises an amino acid sequence having SEQ ID NO: 10, SEQ ID NO: 11, or SEQ ID NO: 12.

[0233] In some aspects, the heavy chain variable region and the light chain variable region of the antibody or antigen-binding fragment thereof form an antigen-binding site for a thymic stromal lymphopoietin receptor.

[0234] In some aspects, the antibody or antigen-binding fragment thereof is human, humanized, or chimeric.

[0235] In some aspects, the antibody or antigen-binding fragment thereof is an IgG antibody,

[0236] In some aspects, the antibody or antigen-binding fragment thereof is an IgG1 antibody or an IgG4 antibody.

[0237] In some aspects, the antibody or antigen-binding fragment thereof is an antigen-binding fragment of an antibody.

[0238] In some aspects, the antigen-binding fragment thereof is selected from the group consisting of Fab, F(ab′) 2, Fv, scFv, scFv-Fc, dsFv and a single domain molecule. In some aspects, the antigen-binding fragment is a scFv.

[0239] In some aspects, the antigen-binding fragment is a Fab.

[0240] In some aspects, the antigen-binding fragment is an intrabody.

[0241] In some aspects, the antigen-binding fragment is devoid of an Fc region.

[0242] In some aspects, the antibody or antigen-binding fragment thereof comprises a VH and a VL on the same polypeptide chain.

[0243] In some aspects, the VH and VL are connected by a linker.

[0244] In some aspects, the antibody or antigen-binding fragment thereof is conjugated to an agent selected from the group consisting of a therapeutic agent, a prodrug, a peptide, a protein, an enzyme, a virus, a lipid, a biological response modifier, a pharmaceutical agent, and PEG.

[0245] The present disclosure also provides bispecific binding proteins comprising three chains: a first chain comprising, in order from the N-terminus to the C-terminus, a heavy chain variable region, and a heavy chain constant region; a second chain comprising, in order from the N-terminus to the C-terminus, a light chain variable region, and a light chain constant region; and a third chain comprising, in order from the N-terminus to the C-terminus, a single chain variable fragment (scFv), and a heavy chain constant region; wherein the scFv of the third chain, in order from the N-terminus to the C-terminus, comprises a heavy chain variable region and a light chain variable region or, in order from the N-terminus to the C-terminus, comprises a light chain variable region and a heavy chain variable region; wherein the heavy chain variable region of the third chain comprises an amino acid sequence that comprises SEQ ID NO: 1, 2, and 3 and the light chain variable region of the third chain comprises an amino acid sequence that comprises SEQ ID NO; 4, 5, and 6; wherein the heavy chain variable region of the first chain and the heavy chain variable region of the third chain comprise different amino acid sequences and the light chain variable region of the second chain and the light chain variable region of the scFv of the third chain comprise different amino acid sequences; wherein the heavy chain variable region of the first chain comprises an amino acid sequence selected from the group consisting of SEQ ID NO: 13, 40, 41, 16, 64, 65, 19, 52, 53, and combinations thereof; an amino acid sequence selected from the group consisting of SEQ ID NO: 14, 42, 43, 17, 66, 67, 20, 54, 55, and combinations thereof; and an amino acid sequence selected from the group consisting of SEQ ID NO: 15, 44, 45, 18, 68, 69, 21, 56, 57, and combinations thereof; wherein the light chain variable region of the second chain comprises an amino acid sequence selected from the group consisting of SEQ ID NO: 22, 46, 47, 25, 70, 71, 28, 58, 59, and combinations thereof; an amino acid sequence selected from the group consisting of SEQ ID NO: 23, 48, 49, 26, 72, 73, 29, 60, 61, and combinations thereof; and an amino acid sequence selected from the group consisting of SEQ ID NO: 24, 50, 51, 27, 74, 75, 30, 62, 63, and combinations thereof; and wherein the heavy chain constant region of the first chain comprises an amino acid sequence that is at least 90% identical to the heavy chain constant region of the third chain and wherein the heavy chain constant region of the first chain and the heavy chain constant region of the third chain dimerize.

[0246] In some aspects of the bispecific binding proteins, a) the heavy chain variable region of the first chain comprises an amino acid sequence having SEQ ID NO: 13, 14, and 15, and the light chain variable region of the second chain comprises an amino acid sequence having SEQ ID NO: 22, 23, and 24; b) the heavy chain variable region of the first chain comprises an amino acid sequence having SEQ ID NO: 40, 42, and 44, and the light chain variable region of the second chain comprises an amino acid sequence having SEQ ID NO: 46, 48, and 50; c) the heavy chain variable region of the first chain comprises an amino acid sequence having SEQ ID NO: 41, 43, and 45, and the light chain variable region of the second chain comprises an amino acid sequence having SEQ ID NO: 47, 49, and 51; d) the heavy chain variable region of the first chain comprises an amino acid sequence having SEQ ID NO: 16, 17, and 18, and the light chain variable region of the second chain comprises an amino acid sequence having SEQ ID NO: 25, 26, and 27; e) the heavy chain variable region of the first chain comprises an amino acid sequence having SEQ ID NO: 64, 66, and 68, and the light chain variable region of the second chain comprises an amino acid sequence having SEQ ID NO: 70, 72, and 74; f) the heavy chain variable region of the first chain comprises an amino acid sequence having SEQ ID NO: 65, 67, and 69, and the light chain variable region of the second chain comprises an amino acid sequence having SEQ ID NO: 71, 73, and 75; g) the heavy chain variable region of the first chain comprises an amino acid sequence having SEQ ID NO: 19, 20, and 21, and the light chain variable region of the second chain comprises an amino acid sequence having SEQ ID NO: 28, 29, and 30; h) the heavy chain variable region of the first chain comprises an amino acid sequence having SEQ ID NO: 52, 54, and 56, and the light chain variable region of the second chain comprises an amino acid sequence having SEQ ID NO: 58, 60, and 62; or i) the heavy chain variable region of the first chain comprises an amino acid sequence having SEQ ID NO: 53, 55, and 57, and the light chain variable region of the second chain comprises an amino acid sequence having SEQ ID NO: 59, 61, and 63.

[0247] In some aspects, the bispecific binding proteins comprise a heavy chain constant region of the first chain which comprises a CH1 domain and a Fc region comprising CH2 and CH3 domains and a heavy chain constant region of the third chain which comprises a CH1 domain and a Fc region comprising CH2 and CH3 domains.

[0248] In some aspects, the heavy chain constant region of the first chain of the bispecific binding protein comprises an amino acid sequence that is at least 95% identical to the heavy chain constant region of the third chain.

[0249] In some aspects, the heavy chain constant region of the first chain of the bispecific binding protein comprises an amino acid sequence that is at least 97% identical to the heavy chain constant region of the third chain.

[0250] In some aspects, the heavy chain constant region of the first chain and the heavy chain constant region of the third chain are subject to at least one modification to reduce the formation of a homodimer.

[0251] In some aspects, the at least one modification comprises substituting an amino acid residue at the interface of the Fc region of the first chain with an amino acid residue having a side chain with an opposite charge to a residue at the interface of the Fc region of the third chain.

[0252] In some aspects, the amino acid at the interface of the Fc region of the first chain of the bispecific binding protein is selected from a glutamic acid, a serine, and an aspartic acid.

[0253] In some aspects, the amino acid at the interface of the Fc region of the third chain of the bispecific binding protein is selected from a glutamine, a lysine, a leucine, and an asparagine.

[0254] In some aspects, the heavy chain variable region of the first chain of the bispecific binding protein comprises an amino acid sequence that is at least 80% identical to SEQ ID NO: 7, SEQ ID NO: 8, or SEQ ID NO: 9.

[0255] In some aspects, the heavy chain variable region of the first chain of the bispecific binding protein comprises an amino acid sequence that is at least 85% identical to SEQ ID NO: 7, SEQ ID NO: 8, or SEQ ID NO: 9.

[0256] In some aspects, the heavy chain variable region of the first chain of the bispecific binding protein comprises an amino acid sequence that is at least 90% identical to SEQ ID NO: 7, SEQ ID NO: 8, or SEQ ID NO: 9.

[0257] In some aspects, the heavy chain variable region of the first chain of the bispecific binding protein comprises an amino acid sequence that is at least 95% identical to SEQ ID NO: 7, SEQ ID NO: 8, or SEQ ID NO: 9.

[0258] In some aspects, the heavy chain variable region of the first chain of the bispecific binding protein comprises an amino acid sequence having SEQ ID NO: 7, SEQ ID NO: 8, or SEQ ID NO: 9.

[0259] In some aspects, the light chain variable region of the second chain of the bispecific binding protein comprises an amino acid sequence that is at least 80% identical to SEQ ID NO: 10, SEQ ID NO: 11, or SEQ ID NO: 12.

[0260] In some aspects, the light chain variable region of the second chain of the bispecific binding protein comprises an amino acid sequence that is at least 85% identical to SEQ ID NO: 10, SEQ ID NO: 11, or SEQ ID NO: 12.

[0261] In some aspects, the light chain variable region of the second chain of the bispecific binding protein comprises an amino acid sequence that is at least 90% identical to SEQ ID NO: 10, SEQ ID NO: 11, or SEQ ID NO: 12.

[0262] In some aspects, the light chain variable region of the second chain of the bispecific binding protein comprises an amino acid sequence that is at least 95% identical to SEQ ID NO: 10, SEQ ID NO: 11, or SEQ ID NO: 12.

[0263] In some aspects, the light chain variable region of the second chain of the bispecific binding protein comprises an amino acid sequence having SEQ ID NO: 10, SEQ ID NO: 11, or SEQ ID NO: 12.

[0264] In some aspects, the heavy chain variable region of the first chain and the light chain variable region of the second chain of the bispecific binding protein form an antigen-binding site for a thymic stromal lymphopoietin receptor.

[0265] In some aspects, the heavy chain variable region and the light chain variable region of the third chain form an antigen-binding site for CD3.

[0266] In some aspects, the heavy chain constant region of the first chain and the heavy chain constant region of the third chain of the bispecific binding protein further comprise a hinge region between the CH1 domain and the Fc region.

[0267] In some aspects, an intermolecular disulfide bond is provided between the hinge region of the first chain and the hinge region of the third chain by introducing cysteine at corresponding positions between the CH3 domain of the Fc region of the first chain and the CH3 domain of the Fc region of the third chain.

[0268] The present disclosure provides pharmaceutical compositions comprising the bispecific binding proteins of the invention, and at least one pharmaceutically acceptable excipient.

[0269] The present disclosure provides formulations comprising the bispecific binding proteins of the invention.

[0270] The present disclosure provides methods of treating a cancer in a subject in need thereof, the method comprising administering to the subject an effective amount of a pharmaceutical composition or a formulation comprising a bispecific binding protein according to the invention.

[0271] In some aspects, the cancer is Acute Lymphoblastic Leukemia, B-cell Acute Lymphoblastic Leukemia, and specifically Philadelphia chromosome-like B Cell Acute Lymphoblastic Leukemia. In some aspects, the cancer overexpresses TSLPR.

[0272] In some aspects, the methods further comprise administering to the subject an effective amount of an additional cancer therapy. In some aspects, the additional cancer therapy is selected from radiation therapy, surgery, chemotherapy, gene therapy, DNA therapy, viral therapy, RNA therapy, immunotherapy, bone marrow transplantation, nanotherapy, monoclonal antibody therapy, and a combination thereof.

[0273] In some aspects, the methods further comprise performing a chemiluminescence immunoassay (CLIA) on cells of the subject to quantify TSLPR expression; performing a genetic analysis including genome and/or transcriptome profiling to quantify genes and/or transcripts of Ph-like B-ALL; or both. The present disclosure provides a kit comprising a bispecific binding protein as described herein, a pharmaceutical composition as described herein, or a formulation as described herein.

### BRIEF DESCRIPTION OF THE DRAWINGS

[0274] FIG. 1A shows a histogram of TSLPR expression in pre-B-ALL cells of a first patient sample (Pt4). FIG. 1B shows a histogram of TSLPR expression in pre-B-ALL cells of a second patient sample (Pt8). FIG. 1C shows a histogram of TSLPR expression in pre-B-ALL cells of a third patient sample (Pt13). FIG. 1D shows a histogram of TSLPR expression in pre-B-ALL cells of a fourth patient sample (Pt14). FIG. 1E shows a histogram of TSLPR expression in pre-B-ALL cells of a fifth patient sample (Pt15). FIG. 1F shows a histogram of CD19 expression in pre-B-ALL cells of the first patient sample (Pt4). FIG. 1G shows a histogram of CD19 expression in pre-B-ALL cells of the second patient sample (Pt8). FIG. 1H shows a histogram of CD19 expression in pre-B-ALL cells of the third patient sample (Pt13). FIG. 1I shows a histogram of CD19 expression in pre-B-ALL cells of the fourth patient sample (Pt14). FIG. 1J shows a histogram of CD19 expression in pre-B-ALL cells of the fifth patient sample (Pt15).

[0275] FIG. 2A shows a sensogram of binding of a TSLPR x CD3 bispecific antibody to TSLPR. FIG. 2B shows a sensogram of binding of a TSLPR x CD3 bispecific antibody to CD3-Fc. FIG. 2C shows an Ultra Performance Liquid Chromatography (UPLC™) of the TSLPR x CD3 bispecific antibody. FIG. 2D shows a mass spectrum identifying the whole bispecific TSLPR x CD3 molecule. FIG. 2E shows a cytotoxicity assay and half-maximal effective concentrations (EC₅₀) for a monospecific TSLPR antibody and the bispecific TSLPR x CD3 antibody.

[0276] FIG. 3 shows bioluminescence imaging results over time of mice xenografted with luciferase-expressing ALL blasts and donor-derived PBMCs from two different human donors (PBMC-296, left panels, and PBMC-879, right panels) and injected with TSLPR x CD3e bispecific antibodies or PBS (control).

[0277] FIG. 4A shows the percentage of live patient-derived ALL blasts in the blood of mice xenografted with the patient-derived blasts and injected with PBMC-875 cells and different concentrations of TSLPR x CD3 bispecific antibody; control mice were injected with PBS only or PBMC-875 cells and PBS. FIG. 4B shows the percentage of live patient-derived ALL blasts in the bone marrow of mice xenografted with the patient-derived ALL blasts and injected with PBMC-875 cells and different concentrations of TSLPR x CD3 bispecific antibody; control mice were injected with PBS only or PBMC-875 cells and PBS. FIG. 4C shows the percentage of live patient-derived ALL blasts in the spleen of mice xenografted with the patient-derived ALL blasts and injected with PBMC-875 cells and different concentrations of TSLPR x CD3 bispecific antibody; control mice were injected with PBS only or PBMC-875 cells and PBS.

[0278] FIG. 5A shows the percentage of CD3⁺ cells in blood over time in mice xenografted with patient-derived ALL blasts and injected with PBMC-875 cells and 1 mg/kg TSLPR x CD3 bispecific antibody. FIG. 5B shows the percentage of CD3⁺ cells in the bone marrow of mice xenografted with patient-derived ALL blasts and injected with PBMC-875 cells and 0.01, 0.1, and 1 mg/kg TSLPR x CD3 bispecific antibody. FIG. 5C shows the percentage of CD3⁺ cells in the spleen of mice xenografted with patient-derived ALL blasts and injected with PBMC-875 cells and 0.01, 0.1, and 1 mg/kg of TSLPR x CD3 bispecific antibody.

[0279] FIG. 6 shows the serum concentrations of TSLPR x CD3 bispecific antibody in non-human primates 4 and 24 h after a first and a second dose of TSLPR x CD3 antibody.

[0280] FIG. 7A shows the fold changes in serum levels of IFN-γ in the serum of non-human primates 4 and 24 h after injection of different concentrations of the TSLPR x CD3 bispecific antibody. FIG. 7B shows the fold changes in serum levels of IL-6 in the serum of non-human primates 4 and 24 h after injection of different concentrations of the TSLPR x CD3 bispecific antibody. FIG. 7C shows the fold changes in serum levels of IL-8 in the serum of non-human primates 4 and 24 h after injection of different concentrations of the TSLPR x CD3 bispecific antibody. FIG. 7D shows the fold changes in serum levels of IL-10 in the serum of non-human primates 4 and 24 h after injection of different concentrations of the TSLPR x CD3 bispecific antibody. FIG. 7E shows the fold changes in serum levels of MCP-1 in the serum of non-human primates 4 and 24 h after injection of different concentrations of the TSLPR x CD3 bispecific antibody. FIG. 7F shows the fold changes in serum levels of TNF-α in the serum of non-human primates 4 and 24 h after injection of different concentrations of the TSLPR x CD3 bispecific antibody.

[0281] FIG. 8 shows the pharmacokinetics of TSLPR x CD3 bispecific antibody in mice as serum concentrations over time of TSLPR x CD3 bispecific antibody injected at doses of 0.3 and 1 mg/kg.

[0282] FIG. 9A shows relative light units (RLU) for fluorescent signals of an ADCC assay performed with target cells in the presence of different concentrations of TSLPR-004 and TSLPR-006 antibodies. FIG. 9B shows percent killing of TSLPR-expressing REH tumor target cells in a primary ADCC assay in the presence of different concentrations of TSLPR-004 and TSLPR-006 antibodies. FIG. 9C shows percent phagocytosis of TSLPR-expressing REH cells by human PBMC-derived monocytes in the presence of 1 μg/ml and 10 μg/ml TSLPR-006 antibodies or in the presence of 10 μg/ml huIgG1 control antibodies, no antibodies or REH cells alone. The top row shows phagocytosis results at effector:target ratios of 1:1 and the bottom row shows phagocytosis results at effector:target ratios of 2:1. FIG. 9D shows western blots of total and phosphorylated Jak2 and Stat5 in TSLPR-antibody-coated REH cells after stimulation with different concentrations of TSLP. FIG. 9E shows western blots of total and phosphorylated S6R in TSLPR-antibody-coated REH cells prior to and after stimulation with different concentrations of TSLP (right panel) and REH cells incubated with Herceptin and 2D10 control antibodies prior to and after stimulation with different concentrations of TSLP (left panel).

[0283] FIG. 10A shows a sensogram of binding of TSLPR antibody clone 2E4 to TSLPR. FIG. 10B shows a sensogram of binding of TSLPR antibody clone 2H8 to TSLPR. FIG. 10C shows a sensogram of binding of TSLPR antibody clone 3E5 to TSLPR. FIG. 10D shows a sensogram of binding of TSLPR antibody clone 1A9 to TSLPR. FIG. 10E shows a sensogram of binding of TSLPR antibody clone 1A10 to TSLPR. FIG. 10F shows a sensogram of binding of TSLPR antibody clone 1B7 to TSLPR. FIG. 10G shows a sensogram of binding of TSLPR antibody clone 1B9 to TSLPR. FIG. 10H shows a sensogram of binding of TSLPR antibody clone 1D10 to TSLPR. FIG. 10I shows a sensogram of binding of TSLPR antibody clone 1F6 to TSLPR. FIG. 10J shows a sensogram of binding of TSLPR antibody clone 1G3 to TSLPR. FIG. 10K shows a sensogram of binding of TSLPR antibody clone 3D8 to TSLPR. FIG. 10L shows a sensogram of binding of TSLPR antibody clone 10C4 to TSLPR. FIG. 10M shows a sensogram of binding of TSLPR antibody clone 2A4 to TSLPR. FIG. 10N shows a sensogram of binding of TSLPR antibody clone 2B2 to TSLPR. FIG. 10O shows a sensogram of binding of TSLPR antibody clone 2D11 to TSLPR. FIG. 10P shows a sensogram of binding of TSLPR antibody clone 2E6 to TSLPR. FIG. 10Q shows a sensogram of binding of TSLPR antibody clone 2F1 to TSLPR. FIG. 10R shows a sensogram of binding of TSLPR antibody clone 2F5 to TSLPR. FIG. 10S shows a sensogram of binding of TSLPR antibody clone 2H1 to TSLPR. FIG. 10T shows a sensogram of binding of TSLPR antibody clone 2H4 to TSLPR. FIG. 10U shows a sensogram of binding of TSLPR antibody clone 1C3 to TSLPR.

[0284] FIG. 11A shows a graph of tumor volume over time in tumor-bearing mice treated with TSLPR antibodies 1A9, 1B7, 1C3, and Fc-modified 1C3 compared to Herceptin control. FIG. 11B shows the percentages of tumor growth inhibition of TSLPR antibodies 1A9, 1B7, 1C3, and Fc-modified 1C3.

[0285] FIGS. 12A-12F depict useful pairs of heterodimerization variant sets (including skew and pI variants). In FIG. 12F, there are variants for which there are no corresponding “monomer 2” variants. Such variants are pI variants that can be used alone on either monomer of a bispecific antibody, or included, for example, on the non-scFv side of a format that utilizes an scFv as a component and an appropriate charged scFv linker can be used on the second monomer that utilizes an scFv as the CD3 binding domain. Suitable charged linkers are shown in FIG. 15.

[0286] FIG. 13 depicts a list of isosteric variant antibody constant regions and their respective substitutions. pI_(−) indicates lower pI variants, while pI_(+) indicates higher pI variants. These variants can be optionally and independently combined with other variants, including heterodimerization variants, outlined herein.

[0287] FIG. 14 depict useful ablation variants that ablate FcγR binding (also referred to as “knockouts” or “KO” variants). In some embodiments, such ablation variants are included in the Fc domain of both monomers of the subject antibody described herein. In other embodiments, the ablation variants are only included on only one variant Fc domain.

[0288] FIG. 15 depicts a number of charged scFv linkers that find use in increasing or decreasing the pI of the subject heterodimeric bispecific antibodies that utilize one or more scFv as a component, as described herein (e.g., anti-TSLPR x anti-CD3e bsAbs). The (+H) positive linker finds particular use herein, particularly with anti-CD3 VL and VH sequences shown herein. A single prior art scFv linker with a single charge is referenced as “Whitlow,” from Whitlow et al., Protein Engineering 6 (8): 989-995 (1993). It should be noted that this linker was used for reducing aggregation and enhancing proteolytic stability in scFvs. Such charged scFv linkers can be used in any of the subject antibody formats disclosed herein that include scFvs (e.g., 1+1 Fab-scFv-Fc and 2+1 Fab2-scFv-Fc formats).

[0289] FIGS. 16A and 16B depict a number of exemplary domain linkers. In some embodiments, these linkers find use linking a single-chain Fv to an Fc chain. In some embodiments, these linkers may be combined in any orientation. For example, a GGGGS linker may be combined with a “lower half hinge” linker at the N-terminus or at the C-terminus.

[0290] FIG. 17 shows a particularly useful bispecific antibody platform for the TSLPR x CD3 bsAbs of the invention. Although the platforms are described here in the context of the 1+1 Fab-scFv-Fc format, they can be adapted for use in other bispecific antibody formats.

[0291] FIG. 18 depicts various heterodimeric skew variant amino acid substitutions that can be used with the heterodimeric antibodies described herein.

[0292] FIGS. 19A-19E show the sequences of several useful heterodimeric TSLPR x CD3 bsAb backbones based on human IgG1, without the variable domain. Heterodimeric Fc backbone 1 is based on human IgG1 (356E/358M allotype), and includes the L368D/K370S skew variants and the Q295E/N384D/Q418E/N421D pI variants on a first heterodimeric Fc chain, the S364K/E357Q skew variants on a second heterodimeric Fc chain, and the E233P/L234V/L235A/G236del/S267K ablation variants on both chains. Heterodimeric Fc backbone 2 is based on human IgG1 (356E/358M allotype), and includes the L368D/K370S skew variants and the Q295E/N384D/Q418E/N421D pI variants on a first heterodimeric Fc chain, the S364K skew variant on a second heterodimeric Fc chain, and the E233P/L234V/L235A/G236del/S267K ablation variants on both chains. Heterodimeric Fc backbone 3 is based on human IgG1 (356E/358M allotype), and includes the L368E/K370S skew variants and the Q295E/N384D/Q418E/N421D pI variants on a first heterodimeric Fc chain, the S364K skew variant on a second heterodimeric Fc chain, and the E233P/L234V/L235A/G236del/S267K ablation variants on both chains. Heterodimeric Fc backbone 4 is based on human IgG1 (356E/358M allotype), and includes the K360E/Q362E/T411E skew variants and the Q295E/N384D/Q418E/N421D pI variants on a first heterodimeric Fc chain, the D401K skew variant on a second heterodimeric Fc chain, and the E233P/L234V/L235A/G236del/S267K ablation variants on both chains. Heterodimeric Fc backbone 5 is based on human IgG1 (356D/358L allotype), and includes the L368D/K370S skew variants and the Q295E/N384D/Q418E/N421D pI variants on a first heterodimeric Fc chain, the S364K/E357Q skew variants on a second heterodimeric Fc chain, and the E233P/L234V/L235A/G236del/S267K ablation variants on both chains. Heterodimeric Fc backbone 6 is based on human IgG1 (356E/358M allotype), and includes the L368D/K370S skew variants and the Q295E/N384D/Q418E/N421D pI variants on a first heterodimeric Fc chain, the S364K/E357Q skew variants on a second heterodimeric Fc chain, and the E233P/L234V/L235A/G236del/S267K ablation variants and N297A variant that removes glycosylation on both chains. Heterodimeric Fc backbone 7 is based on human IgG1 (356E/358M allotype), and includes the L368D/K370S skew variants and the Q295E/N384D/Q418E/N421D pI variants on a first heterodimeric Fc chain, the S364K/E357Q skew variants on a second heterodimeric Fc chain, and the E233P/L234V/L235A/G236del/S267K ablation variants and N297S variant that removes glycosylation on both chains. Heterodimeric Fc backbone 8 is based on human IgG4, and includes the L368D/K370S skew variants and the Q295E/N384D/Q418E/N421D pI variants on a first heterodimeric Fc chain, the S364K/E357Q skew variants on a second heterodimeric Fc chain, and the S228P (according to EU numbering, S241P in Kabat) variant that ablates Fab arm exchange (as is known in the art) on both chains. Heterodimeric Fc backbone 9 is based on human IgG2, and includes the L368D/K370S skew variants and the Q295E/N384D/Q418E/N421D pI variants on a first heterodimeric Fc chain, the S364K/E357Q skew variants on a second heterodimeric Fc chain. Heterodimeric Fc backbone 10 is based on human IgG2, and includes the L368D/K370S skew variants and the Q295E/N384D/Q418E/N421D pI variants on a first heterodimeric Fc chain, the S364K/E357Q skew variants on a second heterodimeric Fc chain, and the S267K ablation variant on both chains. Heterodimeric Fc backbone 11 is based on human IgG1 (356E/358M allotype), and includes the L368D/K370S skew variants and the Q295E/N384D/Q418E/N421D pI variants on a first heterodimeric Fc chain, the S364K/E357Q skew variants on a second heterodimeric Fc chain, and the E233P/L234V/L235A/G236del/S267K ablation variants and M428L/N434S Xtend variants on both chains. Heterodimeric Fc backbone 12 is based on human IgG1 (356E/358M allotype), and includes the L368D/K370S skew variants on a first heterodimeric Fc chain, the S364K/E357Q skew variants and P217R/P229R/N276K pI variants on a second heterodimeric Fc chain, and the E233P/L234V/L235A/G236del/S267K ablation variants on both chains. Heterodimeric Fc backbone 13 is based on human IgG1 (356E/358M allotype), and includes the T366W skew variant on a first heterodimeric Fc chain, the T366S/L368A/Y407V skew variants and H435R/Y436F purification variants on a second heterodimeric Fc chain, and the L234A/L235A/D265S ablation variants on both chains. Heterodimeric Fc backbone 14 is based on human IgG1 (356E/358M allotype), and includes the T366W skew variant on a first heterodimeric Fc chain, the T366S/L368A/Y407V skew variants and H435R/Y436F purification variants on a second heterodimeric Fc chain, and the L234A/L235A/D265S ablation variants and M252Y/S254T/T256E half-life extension variants on both chains. Heterodimeric Fc backbone 15 is based on human IgG1 (356D/358L allotype), and includes the L368D/K370S skew variants and the Q295E/N384D/Q418E/N421D pI variants on a first heterodimeric Fc chain, the S364K/E357Q skew variants on a second heterodimeric Fc chain, and the E233P/L234V/L235A/G236del/S267K ablation variants and M428L/N434S Xtend variants on both chains. Heterodimeric Fc backbone 16 is based on human IgG1 (356E/358M allotype), and includes the L368D/K370S skew variants and the Q295E/N384D/Q418E/N421D pI variants on a first heterodimeric Fc chain, the S364K/E357Q skew variants on a second heterodimeric Fc chain, and the E233P/L234V/L235A/G236del/S267K ablation variants and M428L/N434A Xtend variants on both chains. Heterodimeric Fc backbone 17 is based on human IgG1 (356D/358L allotype), and includes the L368D/K370S skew variants and the Q295E/N384D/Q418E/N421D pI variants on a first heterodimeric Fc chain, the S364K/E357Q skew variants on a second heterodimeric Fc chain, and the E233P/L234V/L235A/G236del/S267K ablation variants and M428L/N434A Xtend variants on both chains.

[0293] Included within each of these backbones are sequences that are 90, 95, 98 and 99% identical (as defined herein) to the recited sequences, and/or contain from 1, 2, 3, 4, 5, 6, 7, 8, 9 or 10 additional amino acid substitutions (as compared to the “parent” of the Figure, which, as will be appreciated by those in the art, already contain a number of amino acid modifications as compared to the parental human IgG1 (or IgG2 or IgG4, depending on the backbone). That is, the recited backbones may contain additional amino acid modifications (generally amino acid substitutions) in addition or as an alternative to the skew, pI and ablation variants contained within the backbones of this Figure. Additionally, the backbones depicted herein may include deletion of the C-terminal glycine (G446_) and/or lysine (K447_). The C-terminal glycine and/or lysine deletion may be intentionally engineered to reduce heterogeneity or in the context of certain bispecific formats, such as the mAb-scFv format. Additionally, C-terminal glycine and/or lysine deletion may occur naturally for example during production and storage.

[0294] FIG. 20 depicts sequences for “CH1” that find use in embodiments of TSLPR x CD3 bsAbs.

[0295] FIG. 21 depicts sequences for “hinge” that find use in embodiments of TSLPR x CD3 bsAbs.

[0296] FIG. 22 depicts the constant domain of the cognate light chains that find use in the subject TSLPR x CD3 bsAbs that utilize a Fab binding domain.

[0297] FIG. 23 depicts a couple of formats of the present invention. FIG. 23A depicts the “1+1 Fab-scFv-Fc” format, with a first Fab arm binding TSLPR and a second scFv arm binding CD3. FIG. 23B depicts the “2+1 Fab2-scFv-Fc” format, with a first Fab arm binding TSLPR and a second Fab-scFv arm, wherein the Fab binds TSLPR and the scFv binds CD3.

[0298] FIGS. 24A-24E depict sequences for exemplary anti-CD3 scFvs suitable for use in the bispecific antibodies of the invention. The CDRs are underlined, the scFv linker is double underlined (in the sequences, the scFv linker is a positively charged scFv (GKPGS)₄ linker (SEQ ID NO: XXX), although as will be appreciated by those in the art, this linker can be replaced by other linkers, including uncharged or negatively charged linkers, some of which are depicted in FIG. 15), and the slashes indicate the border(s) of the variable domains. In addition, the naming convention illustrates the orientation of the scFv from N- to C-terminus. As noted herein and is true for every sequence herein containing CDRs, the exact identification of the CDR locations may be slightly different depending on the numbering used as is shown in Table 2, and thus included herein are not only the CDRs that are underlined but also CDRs included within the V_{H} and V_{L} domains using other numbering systems. Furthermore, as for all the sequences in the Figures, these V_{H} and V_{L} sequences can be used either in a scFv format or in a Fab format.

[0299] FIG. 25 depicts sequences for illustrative bivalent TSLPR mAb using the 1B7 binding domain.

[0300] FIGS. 26A-26G depict sequences for illustrative TSLPR x CD3 bsAb in the 1+1 Fab-scFv-Fc and 2+1 Fab2-scFv-Fc formats and the 1B7 TSLPR binding domain. Slashes indicate the border(s) between the variable regions (e.g. VH and VL) and other domains (e.g. linkers and constant domains). It should be noted that the TSLPR x CD3 bsAbs can utilize variable regions, Fc region, and constant domain sequences that are 90, 95, 98 and 99% identical (as defined herein), and/or contain from 1, 2, 3, 4, 5, 6, 7, 8, 9 or 10 amino acid substitutions.

[0301] FIG. 27 depicts binding of illustrative TSLPR x CD3 bispecific antibodies XENP39597 (1+1; CD3-High [VHVL]) and XENP39599 (2+1; CD3-Hight-Int #1[VL VH]) and bivalent TSLPR mAb to U266B1 and SNU423 cells.

[0302] FIGS. 28A and 28B depict induction of RTCC on A) U266B1 and B) SNU423 cells by illustrative TSLPR x CD3 bispecific antibodies XENP39597 (1+1; CD3-High [VHVL]), XENP39598 (1+1; CD3-Hight-Int #1[VHVL], and XENP39599 (2+1; CD3-Hight-Int #1[VLVH]). 20K U266B1 or SNU423 cells were incubated with 200K T cells (isolated from PBMC) with various concentrations of TSLPR x CD3 bispecific antibodies at 37° C. for 48 hours.

[0303] FIGS. 29A-29C depict induction of RTCC on A) U266B1, B) MHH-CALL-4, and C) MUTZ5 cells by illustrative TSLPR x CD3 bispecific antibodies XENP39597 (1+1; CD3-High [VHVL]), XENP39598 (1+1; CD3-Hight-Int #1[VHVL], and XENP39599 (2+1; CD3-Hight-Int #1[VLVH]) and negative control RSV x CD3 bispecific antibodies XENP13245 (1+1; CD3-High [VHVL]) and XENP32140 (2+1; CD3-High-Int #1[VLVH]). 20K U266B1, MHH-CALL-4, or MUTZ5 cells were incubated with human PBMCs (1:1 effector:target) with various concentrations of TSLPR x CD3 bispecific antibodies at 37° C. for 24 hours.

[0304] FIG. 30 depicts induction of RTCC on A) Reh/TSLPR-Low (55K antigen density), B) Reh/TSLPR-Medium (100K antigen density), C) Reh/TSLPR-High (160K antigen density), and D) Reh/TSLPR-parental (0.4K antigen density) cells by illustrative TSLPR x CD3 bispecific antibodies XENP39597 (1+1; CD3-High [VHVL]), XENP39598 (1+1; CD3-Hight-Int #1[VHVL], and XENP39599 (2+1; CD3-Hight-Int #1[VLVH]) and negative control RSV x CD3 bispecific antibodies XENP13245 (1+1; CD3-High [VHVL]) and XENP32140 (2+1; CD3-High-Int #1[VLVH]). Cells were incubated with T cells isolated from human PBMCs (1:1 effector:target) with various concentrations of TSLPR x CD3 bispecific antibodies at 37° C. for 48 hours.

[0305] FIG. 31 depicts induction of RTCC on MUTZ5 cells by illustrative TSLPR x CD3 bispecific antibodies XENP39597 (1+1; CD3-High [VHVL]), XENP39598 (1+1; CD3-Hight-Int #1[VHVL], and XENP40361 (1+1; CD3-Hight-Int #2 [VHVL]). Target cells were incubated with T cells isolated from human PBMCs (1:1 effector:target) with various concentrations of TSLPR x CD3 bispecific antibodies at 37° C. for 48 hours.

[0306] FIG. 32 summarizes RTCC EC₅₀ on various cell lines by XENP39597, XENP39598, and XENP39599 as determined by the various experiments.

### DETAILED DESCRIPTION

### I. Overview

[0307] The present disclosure provides antibodies and antigen-binding domain compositions capable of binding to thymic stromal lymphopoietin receptor (TSLPR). In one aspect, provided herein are bispecific antibodies that bind thymic stromal lymphopoietin receptor (TSLPR) and CD3 epsilon (CD3e), i.e., anti-TSLPR x anti-CD3e antibodies. In embodiments, these anti-TSLPR x anti-CD3e antibodies are used therapeutic agents for therapies of cancers expressing TSLPR including but not limited to ALL, B-ALL, and, specifically, Ph-like B-ALL. In embodiments, the bispecific antibodies provided herein advantageously have a long in-vivo half-life.

[0308] In some aspects, the anti-TSLPR x anti-CD3e antibody binds monovalently to TSLPR on a first cell and binds monovalently to CD3 on a second cell. In some aspects, the bispecific antibody of the invention binds bivalently to TSLPR on a first cell and binds monovalently to CD3 on a second cell.

[0309] The anti-TSLPR x anti-CD3e antibodies provided herein are multifunctional and can be bispecific or multispecific. In some embodiments, the antibodies of the invention include two binding moieties and one Fc part derived from normal human IgG. In some aspects, the bispecific antibody simultaneously binds to a cancer cell, for example, a leukemia cell, which expresses or overexpresses TSLPR on the surface and engages a T-cell through binding of CD3e on the T cell surface. In some embodiments, the binding of the anti-TSLPR x anti-CD3e antibody to the cancer cell, for example, the leukemia cell and the T cell leads to T-cell mediated cytotoxicity and results in the killing of the cancer/leukemia cell. The second cell that expresses CD3 on its surface can be a myeloid effector cell, or a T cell. By constructing and using anti-TSLPR x anti-CD3e antibody provided herein, it is possible to recruit myeloid effector cells that express CD3 into close proximity to cancer/leukemia cells that express TSLPR, thereby achieving the purpose of killing the cancer/leukemia cells more effectively.

### II. Nomenclature

[0310] The naming nomenclature of particular antigen binding domains (e.g., CD3e binding domains) use a “Hx.xx_Ly.yy” type of format, with the numbers being unique identifiers to particular variable chain sequences. Thus, for example, the CD3e binding domain “[anti-CD3]_H1.30_L1.47” (FIG. 24A) includes a variable heavy domain, H1.30, and a variable light domain L1.47. In the case that these sequences are used as scFvs, the designation “H1.30_L1.47”, indicates that the binding domain includes a variable heavy domain “H1.30” combined with a variable light domain “L1.47,” and is in VH-linker-VL orientation, from N- to C-terminus. This molecule with the identical sequences of the heavy and light variable domains but in the reverse order (VL-linker-VH orientation, from N- to C-terminus) would be designated “L1.47_H1.30”. Similarly, different constructs may “mix and match” the heavy and light chains as will be evident from the sequence listing and the Figures.

### III. Definitions

[0311] In order that the application may be more completely understood, several definitions are set forth below. Such definitions are meant to encompass grammatical equivalents.

[0312] By “TSLPR,” “TSLP Receptor,” “thymic stromal lymphopoietin receptor,” “CRL2,” and “Cytokine Receptor-Like Factor 2” as used herein is meant the receptor of the cytokine thymic stromal lymphopoietin (SwissProt Q9HC73.1), which receptor is generally expressed on cells of myeloid origin. Unless otherwise stated, the antigen binding domains that bind to human TSLPR binds to the extracellular domain (ECD) of human TSLPR, comprising amino acid residues 25 to 230.

[0313] By “CD3” (cluster of differentiation 3) as used herein is meant a protein complex, that is composed of a CD3 gamma (CD3γ) chain (SwissProt P09693), a CD3 delta (CD3δ) chain (SwissProt P04234), CD3 epsilon (CD3ε and CD3e) chains (SwissProt P07766), and a CD3 zeta chain homodimer (SwissProt P20963). These chains associate with the T-cell receptor (TCR) and the (ζ-chain to generate an activation signal in T lymphocytes. The TCR, ζ-chain, and CD3 molecules together comprise the TCR complex. CD3 is expressed on T cells. Where reference is made to CD3 herein, the reference is to human CD3, unless specifically stated otherwise. Unless otherwise stated, the antigen binding domains that bind to human CD3e generally bind to the ECD of humanCD3e, which is at the N-terminus, and in some cases bind to the first 10⁻¹⁵ amino acids of the mature human CD3e protein.

[0314] By “ablation” as used herein is meant a decrease or removal of activity. Thus, for example, “ablating FcγR binding” means the Fc region amino acid variant has less than 50% starting binding as compared to an Fc region not containing the specific variant, with more than 70-80-90-95-98% loss of activity being preferred, and in general, with the activity being below the level of detectable binding in a Biacore, SPR or BLI assay. Of particular use in the ablation of FcγR binding are those shown in FIG. 3, which generally are added to both monomers.

[0315] By “ADCC” or “antibody dependent cell-mediated cytotoxicity” as used herein is meant the cell-mediated reaction, wherein nonspecific cytotoxic cells that express FcγRs recognize bound antibody on a target cell and subsequently cause lysis of the target cell. ADCC is correlated with binding to FcγRIIIa; increased binding to FcγRIIIa leads to an increase in ADCC activity.

[0316] By “ADCP” or antibody dependent cell-mediated phagocytosis as used herein is meant the cell-mediated reaction wherein nonspecific phagocytic cells that express FcγRs recognize bound antibody on a target cell and subsequently cause phagocytosis of the target cell.

[0317] As used herein, the term “antibody” is used generally. Antibodies provided herein can take on a number of formats as described herein, including traditional antibodies as well as antibody derivatives, fragments and mimetics, described herein.

[0318] Traditional immunoglobulin (Ig) antibodies are “Y” shaped tetramers. Each tetramer is typically composed of two identical pairs of polypeptide chains, each pair having one “light chain” monomer (typically having a molecular weight of about 25 kDa) and one “heavy chain” monomer (typically having a molecular weight of about 50-70 kDa).

[0319] Other useful antibody formats include, but are not limited to, the “1+1 Fab-scFv-Fc,” and “2+1 Fab2-scFv-Fc” formats provided herein (see, e.g., FIG. 23). See also, US20180127501A1, which is incorporated by reference herein, particularly in pertinent part relating to antibody formats (see, e.g., FIG. 2 of US20180127501A1).

[0320] Antibody heavy chains typically include a variable heavy domain (VH, also referred to herein as “heavy chain variable region”), which includes vhCDR1-3, and an Fc domain, which includes a CH2-CH3 monomer. In some embodiments, antibody heavy chains include a hinge and CH1 domain. Traditional antibody heavy chains are monomers that are organized, from N- to C-terminus: VH-CH1-hinge-CH2-CH3. The CH1-hinge-CH2-CH3 is collectively referred to as the heavy chain “constant domain” or “constant region” of the antibody, of which there are five different categories or “isotypes”: IgA, IgD, IgG, IgE and IgM.

[0321] In some embodiments, the antibodies provided herein include IgG isotype constant domains, which has several subclasses, including, but not limited to IgG1, IgG2, IgG3, and IgG4. In the IgG subclass of immunoglobulins, there are several immunoglobulin domains in the heavy chain. By “immunoglobulin (Ig) domain” herein is meant a region of an immunoglobulin having a distinct tertiary structure. Of interest in the present invention are the heavy chain domains, including, the constant heavy (CH) domains and the hinge domains. In the context of IgG antibodies, the IgG isotypes each have three CH regions. Accordingly, “CH” domains in the context of IgG are as follows: “CH1” refers to positions 118-215 according to the EU index as in Kabat. “Hinge” refers to positions 216-230 according to the EU index as in Kabat. “CH2” refers to positions 231-340 according to the EU index as in Kabat, and “CH3” refers to positions 341-447 according to the EU index as in Kabat. As shown in Table 1, the exact numbering and placement of the heavy chain domains can be different among different numbering systems. As shown herein and described below, the pI variants can be in one or more of the CH regions, as well as the hinge region, discussed below.

[0322] It should be noted that IgG1 has different allotypes with polymorphisms at 356 (D or E) and 358 (L or M). The sequences depicted herein use the 356E/358M allotype, however the other allotype is included herein. That is, any sequence inclusive of an IgG1 Fc domain included herein can have 356D/358L replacing the 356E/358M allotype. It should be understood that therapeutic antibodies can also comprise hybrids of isotypes and/or subclasses. For example, as shown in US Publication 2009/0163699, incorporated by reference, the present antibodies, in some embodiments, include human IgG1/G2 hybrids.

[0323] By “Fc” or “Fc region” or “Fc domain” as used herein is meant the polypeptide comprising the constant region of an antibody, in some instances, excluding all of the first constant region immunoglobulin domain (e.g., CH1) or a portion thereof, and in some cases, optionally including all or part of the hinge. For IgG, the Fc domain comprises immunoglobulin domains CH2 and CH3 (Cγ2 and Cγ3), and optionally all or a portion of the hinge region between CH1 (Cγ1) and CH2 (Cγ2). Thus, in some cases, the Fc domain includes, from N- to C-terminal, CH2-CH3 and hinge-CH2-CH3. In some embodiments, the Fc domain is that from IgG1, IgG2, IgG3 or IgG4, with IgG1 hinge-CH2-CH3 and IgG4 hinge-CH2-CH3 finding particular use in many embodiments. Additionally, in the case of human IgG1 Fc domains, the hinge may include a C220S amino acid substitution. Furthermore, in the case of human IgG4 Fc domains, the hinge may include a S228P amino acid substitution. Although the boundaries of the Fc region may vary, the human IgG heavy chain Fc region is usually defined to include residues E216, C226, or A231 to its carboxyl-terminal, wherein the numbering is according to the EU index as in Kabat. In some embodiments, as is more fully described below, amino acid modifications are made to the Fc region, for example to alter binding to one or more FcγR or to the FcRn.

[0324] By “heavy chain constant region” herein is meant the CH1-hinge-CH2-CH3 portion of an antibody (or fragments thereof), excluding the variable heavy domain; in EU numbering of human IgG1 this is amino acids 118-447. By “heavy chain constant region fragment” herein is meant a heavy chain constant region that contains fewer amino acids from either or both of the N- and C-termini but still retains the ability to form a dimer with another heavy chain constant region.

[0325] Another type of domain of the heavy chain is the hinge region. By “hinge” or “hinge region” or “antibody hinge region” or “hinge domain” herein is meant the flexible polypeptide comprising the amino acids between the first and second constant domains of an antibody. Structurally, the IgG CH1 domain ends at EU position 215, and the IgG CH2 domain begins at residue EU position 231. Thus for IgG the antibody hinge is herein defined to include positions 216 (E216 in IgG1) to 230 (P230 in IgG1), wherein the numbering is according to the EU index as in Kabat. In some cases, a “hinge fragment” is used, which contains fewer amino acids at either or both of the N- and C-termini of the hinge domain. As noted herein, pI variants can be made in the hinge region as well. Many of the antibodies herein have at least one the cysteines at position 220 according to EU numbering (hinge region) replaced by a serine. Generally, this modification is on the “scFv monomer” side (when 1+1 or 2+1 formats are used) for most of the sequences depicted herein, although it can also be on the “Fab monomer” side, or both, to reduce disulfide formation. Specifically included within the sequences herein are one or both of these cysteines replaced (C220S).

[0326] As will be appreciated by those in the art, the exact numbering and placement of the heavy chain constant region domains (i.e., CH1, hinge, CH2 and CH3 domains) can be different among different numbering systems. A useful comparison of heavy constant region numbering according to EU and Kabat is as below, see Edelman et al., 1969, Proc Natl Acad Sci USA 63:78-85 and Kabat et al., 1991, Sequences of Proteins of Immunological Interest, 5th Ed., United States Public Health Service, National Institutes of Health, Bethesda, entirely incorporated by reference.

TABLE 1

| | EU Numbering | Kabat Numbering |
|---|---|---|
| CH1 | 118-215 | 114-223 |
| Hinge | 216-230 | 226-243 |
| CH2 | 231-340 | 244-360 |
| CH3 | 341-447 | 361-478 |

[0327] The antibody light chain generally comprises two domains: the variable light domain (VL, also referred to herein as “light chain variable region”), which includes light chain CDRs vlCDR1-3, and a constant light chain region (often referred to as CL or Cκ). The antibody light chain is typically organized from N- to C-terminus: VL-CL.

[0328] By “antigen binding domain” or “ABD” herein is meant a set of six Complementary Determining Regions (CDRs) that, when present as part of a polypeptide sequence, specifically binds a target antigen (e.g., TSLPR or CD3e) as discussed herein. As is known in the art, these CDRs are generally present as a first set of variable heavy CDRs (vhCDRs or VHCDRs) and a second set of variable light CDRs (vlCDRs or VLCDRs), each comprising three CDRs: vhCDR1, vhCDR2, vhCDR3 variable heavy CDRs and vlCDR1, vlCDR2 and vlCDR3 vhCDR3 variable light CDRs. The CDRs are present in the variable heavy domain (vhCDR1-3) and variable light domain (vlCDR1-3). The variable heavy domain and variable light domain from an Fv region.

[0329] The present invention provides a large number of different CDR sets. In this case, a “full CDR set” comprises the three variable light and three variable heavy CDRs, e.g., a vlCDR1, vlCDR2, vlCDR3, vhCDR1, vhCDR2 and vhCDR3. These can be part of a larger variable light or variable heavy domain, respectfully. In addition, as more fully outlined herein, the variable heavy and variable light domains can be on separate polypeptide chains, when a heavy and light chain is used (for example when Fabs are used), or on a single polypeptide chain in the case of scFv sequences.

[0330] As will be appreciated by those in the art, the exact numbering and placement of the CDRs can be different among different numbering systems. However, it should be understood that the disclosure of a variable heavy and/or variable light sequence includes the disclosure of the associated (inherent) CDRs. Accordingly, the disclosure of each variable heavy region is a disclosure of the vhCDRs (e.g., vhCDR1, vhCDR2 and vhCDR3) and the disclosure of each variable light region is a disclosure of the vlCDRs (e.g., vlCDR1, vlCDR2 and vlCDR3). A useful comparison of CDR numbering is as below, see Lafranc et al., Dev. Comp. Immunol. 27 (1): 55-77 (2003):

TABLE 2

| | Kabat + Chothia | IMGT | Kabat | AbM | Chothia | Contact | Xencor |
|---|---|---|---|---|---|---|---|
| vhCDR1 | 26-35 | 27-38 | 31-35 | 26-35 | 26-32 | 30-35 | 27-35 |
| vhCDR2 | 50-65 | 56-65 | 50-65 | 50-58 | 52-56 | 47-58 | 54-61 |
| vhCDR3 | 95-102 | 105-117 | 95-102 | 95-102 | 95-102 | 93-101 | 103-116 |
| vlCDR1 | 24-34 | 27-38 | 24-34 | 24-34 | 24-34 | 30-36 | 27-38 |
| vlCDR2 | 50-56 | 56-65 | 50-56 | 50-56 | 50-56 | 46-55 | 56-62 |
| vlCDR3 | 89-97 | 105-117 | 89-97 | 89-97 | 89-97 | 89-96 | 97-105 |

[0331] Throughout the present specification, the Kabat numbering system is generally used when referring to a residue in the variable domain (approximately, residues 1-107 of the light chain variable region and residues 1-113 of the heavy chain variable region) and the EU numbering system for Fc regions (e.g., Kabat et al., supra (1991)).

[0332] The CDRs contribute to the formation of the antigen-binding, or more specifically, epitope binding site of the antigen binding domains and antibodies. “Epitope” refers to a determinant that interacts with a specific antigen binding site in the variable region of an antibody molecule known as a paratope. Epitopes are groupings of molecules such as amino acids or sugar side chains and usually have specific structural characteristics, as well as specific charge characteristics. A single antigen may have more than one epitope.

[0333] The epitope may comprise amino acid residues directly involved in the binding (also called immunodominant component of the epitope) and other amino acid residues, which are not directly involved in the binding, such as amino acid residues which are effectively blocked by the specifically antigen binding peptide; in other words, the amino acid residue is within the footprint of the specifically antigen binding peptide.

[0334] Epitopes may be either conformational or linear. A conformational epitope is produced by spatially juxtaposed amino acids from different segments of the linear polypeptide chain. A linear epitope is one produced by adjacent amino acid residues in a polypeptide chain. Conformational and nonconformational epitopes may be distinguished in that the binding to the former but not the latter is lost in the presence of denaturing solvents.

[0335] An epitope typically includes at least 3, and more usually, at least 5 or 8-10 amino acids in a unique spatial conformation. Antibodies that recognize the same epitope can be verified in a simple immunoassay showing the ability of one antibody to block the binding of another antibody to a target antigen, for example “binning.” As outlined below, the invention not only includes the enumerated antigen binding domains and antibodies herein, but those that compete for binding with the epitopes bound by the enumerated antigen binding domains.

[0336] In some embodiments, the six CDRs of the antigen binding domain are contributed by a variable heavy domain and a variable light domain. In a “Fab” format, the set of 6 CDRs are contributed by two different polypeptide sequences, the variable heavy domain (vh or VH; containing the vhCDR1, vhCDR2 and vhCDR3) and the variable light domain (vl or VL; containing the vlCDR1, vlCDR2 and vlCDR3), with the C-terminus of the vh domain being attached to the N-terminus of the CH1 domain of the heavy chain and the C-terminus of the vl domain being attached to the N-terminus of the constant light domain (and thus forming the light chain). In a scFv format, the vh and vl domains are covalently attached, generally through the use of a linker (a “scFv linker”) as outlined herein, into a single polypeptide sequence, which can be either (starting from the N-terminus) vh-linker-vl or vl-linker-vh. In general, the C-terminus of the scFv domain is attached to the N-terminus of all or part of the hinge in the second monomer.

[0337] By “variable region” or “variable domain” as used herein is meant the region of an immunoglobulin that comprises one or more Ig domains substantially encoded by any of the Vκ, Vλ, and/or VH genes that make up the kappa, lambda, and heavy chain immunoglobulin genetic loci respectively, and contains the CDRs that confer antigen specificity. Thus, a “variable heavy domain” pairs with a “variable light domain” to form an antigen binding domain (“ABD”). In addition, each variable domain comprises three hypervariable regions (“complementary determining regions,” “CDRs”) (vhCDR1, vhCDR2 and vhCDR3 for the variable heavy domain and vlCDR1, vlCDR2 and vlCDR3 for the variable light domain) and four framework (FR) regions, arranged from amino-terminus to carboxy-terminus in the following order: FR1-CDR1-FR2-CDR2-FR3-CDR3-FR4.

[0338] By “Fab” or “Fab region” as used herein is meant the antibody region that comprises the VH, CH1, VL, and CL immunoglobulin domains, generally on two different polypeptide chains (e.g., VH-CH1 on one chain and VL-CL on the other). Fab may refer to this region in isolation, or this region in the context of a bispecific antibody of the invention. In the context of a Fab, the Fab comprises an Fv region in addition to the CH1 and CL domains.

[0339] By “Fv” or “Fv fragment” or “Fv region” as used herein is meant the antibody region that comprises the VL and VH domains. Fv regions can be formatted as both Fabs (as discussed above, generally two different polypeptides that also include the constant regions as outlined above) and single chain Fvs (scFvs), where the vl and vh domains are included in a single peptide, attached generally with a linker as discussed herein.

[0340] By “single chain Fv” or “scFv” herein is meant a variable heavy domain covalently attached to a variable light domain, generally using a scFv linker as discussed herein, to form a scFv or scFv domain. A scFv domain can be in either orientation from N- to C-terminus (vh-linker-vl or vl-linker-vh). In the sequences depicted in the sequence listing and in the figures, the order of the vh and vl domain is indicated in the name, e.g., H.X_L.Y means N- to C-terminal is vh-linker-vl, and L.Y_H.X is vl-linker-vh.

[0341] Some embodiments of the subject antibodies provided herein comprise at least one scFv domain, which, while not naturally occurring, generally includes a variable heavy domain and a variable light domain, linked together by a scFv linker. As outlined herein, while the scFv domain is generally from N- to C-terminus oriented as VH-scFv linker-VL, this can be reversed for any of the scFv domains (or those constructed using vh and vl sequences from Fabs), to VL-scFv linker-VH, with optional linkers at one or both ends depending on the format.

[0342] By “modification” or “variant” herein is meant an amino acid substitution, insertion, and/or deletion in a polypeptide sequence or an alteration to a moiety chemically linked to a protein. For example, a modification may be an altered carbohydrate or PEG structure attached to a protein. By “amino acid modification” herein is meant an amino acid substitution, insertion, and/or deletion in a polypeptide sequence. For clarity, unless otherwise noted, the amino acid modification is always to an amino acid coded for by DNA, e.g., the 20 amino acids that have codons in DNA and RNA.

[0343] By “amino acid substitution” or “substitution” herein is meant the replacement of an amino acid at a particular position in a parent polypeptide sequence with a different amino acid. In particular, in some embodiments, the substitution is to an amino acid that is not naturally occurring at the particular position, either not naturally occurring within the organism or in any organism. For example, the substitution E272Y refers to a variant polypeptide, in this case an Fc variant, in which the glutamic acid at position 272 is replaced with tyrosine. For clarity, a protein which has been engineered to change the nucleic acid coding sequence but not change the starting amino acid (for example exchanging CGG (encoding arginine) to CGA (still encoding arginine) to increase host organism expression levels) is not an “amino acid substitution;” that is, despite the creation of a new gene encoding the same protein, if the protein has the same amino acid at the particular position that it started with, it is not an amino acid substitution.

[0344] By “amino acid insertion” or “insertion” as used herein is meant the addition of an amino acid sequence at a particular position in a parent polypeptide sequence. For example, −233E or 233E designates an insertion of glutamic acid after position 233 and before position 234. Additionally, −233ADE or A233ADE designates an insertion of AlaAspGlu after position 233 and before position 234.

[0345] By “amino acid deletion” or “deletion” as used herein is meant the removal of an amino acid sequence at a particular position in a parent polypeptide sequence. For example, E233- or E233 #, E233( ) or E233del or E233_ designates a deletion of glutamic acid at position 233. Additionally, EDA233- or EDA233 #designates a deletion of the sequence GluAspAla that begins at position 233.

[0346] By “variant protein” or “protein variant”, or “variant” as used herein is meant a protein that differs from that of a parent protein by virtue of at least one amino acid modification. The protein variant has at least one amino acid modification compared to the parent protein, yet not so many that the variant protein will not align with the parental protein using an alignment program such as that described below. In general, variant proteins (such as variant Fc domains, etc., outlined herein, are generally at least 75, 80, 85, 90, 91, 92, 93, 94, 95, 96, 97, 98 or 99% identical to the parent protein, using the alignment programs described below, such as BLAST.

[0347] “Variant” as used herein also refers to particular amino acid modifications that confer particular function (e.g., a “heterodimerization variant,” “pI variant,” “ablation variant,” etc.).

[0348] As described below, in some embodiments the parent polypeptide, for example an Fc parent polypeptide, is a human wild-type sequence, such as the heavy constant domain or Fc region from IgG1, IgG2, IgG3 or IgG4, although human sequences with variants can also serve as “parent polypeptides”, for example the IgG1/2 hybrid of US Publication 2006/0134105 can be included. The protein variant sequence herein will preferably possess at least about 80% identity with a parent protein sequence, and most preferably at least about 90% identity, more preferably at least about 95-98-99% identity. Accordingly, by “antibody variant” or “variant antibody” as used herein is meant an antibody that differs from a parent antibody by virtue of at least one amino acid modification, “IgG variant” or “variant IgG” as used herein is meant an antibody that differs from a parent IgG (again, in many cases, from a human IgG sequence) by virtue of at least one amino acid modification, and “immunoglobulin variant” or “variant immunoglobulin” as used herein is meant an immunoglobulin sequence that differs from that of a parent immunoglobulin sequence by virtue of at least one amino acid modification. “Fc variant” or “variant Fc” as used herein is meant a protein comprising an amino acid modification in an Fc domain as compared to an Fc domain of human IgG1, IgG2 or IgG4.

[0349] “Fc variant” or “variant Fc” as used herein is meant a protein comprising an amino acid modification in an Fc domain. The modification can be an addition, deletion, or substitution. The Fc variants are defined according to the amino acid modifications that compose them. Thus, for example, N434S or 434S is an Fc variant with the substitution for serine at position 434 relative to the parent Fc polypeptide, wherein the numbering is according to the EU index. Likewise, M428L/N434S defines an Fc variant with the substitutions M428L and N434S relative to the parent Fc polypeptide. The identity of the WT amino acid may be unspecified, in which case the aforementioned variant is referred to as 428L/434S. It is noted that the order in which substitutions are provided is arbitrary, that is to say that, for example, 428L/434S is the same Fc variant as 434S/428L, and so on. For all positions discussed herein that relate to antibodies or derivatives and fragments thereof (e.g., Fc domains), unless otherwise noted, amino acid position numbering is according to the EU index. The “EU index” or “EU index as in Kabat” or “EU numbering” scheme refers to the numbering of the EU antibody (Edelman et al., 1969, Proc Natl Acad Sci USA 63:78-85, hereby entirely incorporated by reference). The modification can be an addition, deletion, or substitution.

[0350] In general, variant Fc domains have at least about 80, 85, 90, 95, 97, 98 or 99 percent identity to the corresponding parental human IgG Fc domain (using the identity algorithms discussed below, with one embodiment utilizing the BLAST algorithm as is known in the art, using default parameters). Alternatively, the variant Fc domains can have from 1, 2, 3, 4, 5, 6, 7, 8, 9, 10, 11, 12, 13, 14, 15, 16, 11, 12, 13, 14, 15, 16, 17, 18, 19 or 20 amino acid modifications as compared to the parental Fc domain. Alternatively, the variant Fc domains can have up to 1, 2, 3, 4, 5, 6, 7, 8, 9, 10, 11, 12, 13, 14, 15, 16, 11, 12, 13, 14, 15, 16, 17, 18, 19 or 20 amino acid modifications as compared to the parental Fc domain. Additionally, as discussed herein, the variant Fc domains described herein still retain the ability to form a dimer with another Fc domain as measured using known techniques as described herein, such as non-denaturing gel electrophoresis.

[0351] By “protein” as used herein is meant at least two covalently attached amino acids, which includes proteins, polypeptides, oligopeptides and peptides. In addition, polypeptides that make up the antibodies of the invention may include synthetic derivatization of one or more side chains or termini, glycosylation, PEGylation, circular permutation, cyclization, linkers to other molecules, fusion to proteins or protein domains, and addition of peptide tags or labels.

[0352] By “residue” as used herein is meant a position in a protein and its associated amino acid identity. For example, Asparagine 297 (also referred to as Asn297 or N297) is a residue at position 297 in the human antibody IgG1.

[0353] By “IgG subclass modification” or “isotype modification” as used herein is meant an amino acid modification that converts one amino acid of one IgG isotype to the corresponding amino acid in a different, aligned IgG isotype. For example, because IgG1 comprises a tyrosine and IgG2 a phenylalanine at EU position 296, a F296Y substitution in IgG2 is considered an IgG subclass modification.

[0354] By “non-naturally occurring modification” as used herein is meant an amino acid modification that is not isotypic. For example, because none of the human IgGs comprise a serine at position 434, the substitution 434S in IgG1, IgG2, IgG3, or IgG4 (or hybrids thereof) is considered a non-naturally occurring modification.

[0355] By “amino acid” and “amino acid identity” as used herein is meant one of the 20 naturally occurring amino acids that are coded for by DNA and RNA.

[0356] By “effector function” as used herein is meant a biochemical event that results from the interaction of an antibody Fc region with an Fc receptor or ligand. Effector functions include but are not limited to ADCC, ADCP, and CDC.

[0357] By “IgG Fc ligand” as used herein is meant a molecule, preferably a polypeptide, from any organism that binds to the Fc region of an IgG antibody to form an Fc/Fc ligand complex. Fc ligands include but are not limited to FcγRIs, FcγRIIs, FcγRIIIs, FcRn, C1q, C3, mannan binding lectin, mannose receptor, staphylococcal protein A, streptococcal protein G, and viral FcγR. Fc ligands also include Fc receptor homologs (FcRH), which are a family of Fc receptors that are homologous to the FcγRs (Davis et al., 2002, Immunological Reviews 190:123-136, entirely incorporated by reference). Fc ligands may include undiscovered molecules that bind Fc. Particular IgG Fc ligands are FcRn and Fc gamma receptors. By “Fc ligand” as used herein is meant a molecule, preferably a polypeptide, from any organism that binds to the Fc region of an antibody to form an Fc/Fc ligand complex.

[0358] By “Fc gamma receptor”, “FcγR” or “FcgammaR” as used herein is meant any member of the family of proteins that bind the IgG antibody Fc region and is encoded by an FcγR gene. In humans this family includes but is not limited to FcγRI (CD64), including isoforms FcγRIa, FcγRIb, and FcγRIc; FcγRII (CD32), including isoforms FcγRIIa (including allotypes H131 and R131), FcγRIIb (including FcγRIIb-1 and FcγRIIb-2), and FcγRIIc; and FcγRIII (CD16), including isoforms FcγRIIIa (including allotypes V158 and F158) and FcγRIIIb (including allotypes FcγRIIb-NA1 and FcγRIIb-NA2) (Jefferis et al., 2002, Immunol Lett 82:57-65, entirely incorporated by reference), as well as any undiscovered human FcγRs or FcγR isoforms or allotypes. An FcγR may be from any organism, including but not limited to humans, mice, rats, rabbits, and monkeys. Mouse FcγRs include but are not limited to FcγRI (CD64), FcγRII (CD32), FcγRIII (CD16), and FcγRIII-2 (CD16-2), as well as any undiscovered mouse FcγRs or FcγR isoforms or allotypes.

[0359] By “FcRn” or “neonatal Fc Receptor” as used herein is meant a protein that binds the IgG antibody Fc region and is encoded at least in part by an FcRn gene. The FcRn may be from any organism, including but not limited to humans, mice, rats, rabbits, and monkeys. As is known in the art, the functional FcRn protein comprises two polypeptides, often referred to as the heavy chain and light chain. The light chain is beta-2-microglobulin and the heavy chain is encoded by the FcRn gene. Unless otherwise noted herein, FcRn or an FcRn protein refers to the complex of FcRn heavy chain with beta-2-microglobulin. A variety of FcRn variants used to increase binding to the FcRn receptor, and in some cases, to increase serum half-life. An “FcRn variant” is an amino acid modification that contributes to increased binding to the FcRn receptor, and suitable FcRn variants are shown below.

[0360] By “parent polypeptide” as used herein is meant a starting polypeptide that is subsequently modified to generate a variant. The parent polypeptide may be a naturally occurring polypeptide, or a variant or engineered version of a naturally occurring polypeptide. Accordingly, by “parent immunoglobulin” as used herein is meant an unmodified immunoglobulin polypeptide that is modified to generate a variant, and by “parent antibody” as used herein is meant an unmodified antibody that is modified to generate a variant antibody. It should be noted that “parent antibody” includes known commercial, recombinantly produced antibodies as outlined below. In this context, a “parent Fc domain” will be relative to the recited variant; thus, a “variant human IgG1 Fc domain” is compared to the parent Fc domain of human IgG1, a “variant human IgG4 Fc domain” is compared to the parent Fc domain human IgG4, etc.

[0361] By “position” as used herein is meant a location in the sequence of a protein. Positions may be numbered sequentially, or according to an established format, for example the EU index for numbering of antibody domains (e.g., a CH1, CH2, CH3 or hinge domain).

[0362] By “target antigen” as used herein is meant the molecule that is bound specifically by the antigen binding domain comprising the variable regions of a given antibody.

[0363] By “strandedness” in the context of the monomers of the heterodimeric antibodies of the invention herein is meant that, similar to the two strands of DNA that “match”, heterodimerization variants are incorporated into each monomer so as to preserve the ability to “match” to form heterodimers. For example, if some pI variants are engineered into monomer A (e.g., making the pI higher) then steric variants that are “charge pairs” that can be utilized as well do not interfere with the pI variants, e.g., the charge variants that make a pI higher are put on the same “strand” or “monomer” to preserve both functionalities. Similarly, for “skew” variants that come in pairs of a set as more fully outlined below, the skilled artisan will consider pI in deciding into which strand or monomer one set of the pair will go, such that pI separation is maximized using the pI of the skews as well.

[0364] By “target cell” as used herein is meant a cell that expresses a target antigen.

[0365] By “host cell” in the context of producing a bispecific antibody according to the invention herein is meant a cell that contains the exogeneous nucleic acids encoding the components of the bispecific antibody and is capable of expressing the bispecific antibody under suitable conditions. Suitable host cells are discussed below.

[0366] By “wild type” or “WT” herein is meant an amino acid sequence or a nucleotide sequence that is found in nature, including allelic variations. A WT protein has an amino acid sequence or a nucleotide sequence that has not been intentionally modified.

[0367] Provided herein are a number of antibody domains (e.g., Fc domains) that have sequence identity to human antibody domains. Sequence identity between two similar sequences (e.g., antibody variable domains) can be measured by algorithms such as that of Smith, T. F. & Waterman, M. S. (1981) “Comparison Of Biosequences,” Adv. Appl. Math. 2:482 [local homology algorithm]; Needleman, S. B. & Wunsch, C D. (1970) “A General Method Applicable To The Search For Similarities In The Amino Acid Sequence Of Two Proteins,” J. Mol. Biol. 48:443 [homology alignment algorithm], Pearson, W. R. & Lipman, D. J. (1988) “Improved Tools For Biological Sequence Comparison,” Proc. Natl. Acad. Sci. (U.S.A.) 85:2444 [search for similarity method]; or Altschul, S. F. et al, (1990) “Basic Local Alignment Search Tool,” J. Mol. Biol. 215:403-10, the “BLAST” algorithm, see https://blast.ncbi.nlm.nih.gov/Blast.cgi. When using any of the aforementioned algorithms, the default parameters (for Window length, gap penalty, etc.) are used. In one embodiment, sequence identity is done using the BLAST algorithm, using default parameters

[0368] The antibodies of the present invention are generally isolated or recombinant. “Isolated,” when used to describe the various polypeptides disclosed herein, means a polypeptide that has been identified and separated and/or recovered from a cell or cell culture from which it was expressed. Ordinarily, an isolated polypeptide will be prepared by at least one purification step. An “isolated antibody,” refers to an antibody which is substantially free of other antibodies having different antigenic specificities. “Recombinant” means the antibodies are generated using recombinant nucleic acid techniques in exogeneous host cells, and they can be isolated as well.

[0369] “Specific binding” or “specifically binds to” or is “specific for” a particular antigen or an epitope means binding that is measurably different from a non-specific interaction. Specific binding can be measured, for example, by determining binding of a molecule compared to binding of a control molecule, which generally is a molecule of similar structure that does not have binding activity. For example, specific binding can be determined by competition with a control molecule that is similar to the target.

[0370] Specific binding for a particular antigen or an epitope can be exhibited, for example, by an antibody having a KD for an antigen or epitope of at least about 10⁻⁴ M, at least about 10⁻⁵ M, at least about 10⁻⁶ M, at least about 10⁻⁷ M, at least about 10⁻⁸ M, at least about 10⁻⁹ M, alternatively at least about 10⁻¹⁰ M, at least about 10⁻¹¹ M, at least about 10⁻¹² M, or greater, where KD refers to a dissociation rate of a particular antibody-antigen interaction. Typically, an antibody that specifically binds an antigen will have a KD that is 20-, 50-, 100-, 500-, 1000-, 5,000-, 10,000- or more times greater for a control molecule relative to the antigen or epitope.

[0371] Also, specific binding for a particular antigen or an epitope can be exhibited, for example, by an antibody having a KA or Ka for an antigen or epitope of at least 20-, 50-, 100-, 500-, 1000-, 5,000-, 10,000- or more times greater for the epitope relative to a control, where KA or Ka refers to an association rate of a particular antibody-antigen interaction. Binding affinity is generally measured using a Biacore, SPR or BLI assay.

### IV. Anti-TSLPR Antibodies and Antigen-Binding Fragments Thereof

[0372] In some aspects, provided herein are anti-TSLPR antibodies (e.g., anti-TSLPR x anti-CD3e antibodies), and antigen-binding fragments thereof which specifically bind to Thymic Stromal Lymphopoietic (TSLPR) (e.g., human TSLPR). In some aspects, the amino acid sequence for human TSLPR comprises SEQ ID NO: 76 (see UniProtKB/Swiss-Prot Accession No. Q9HC73.1).

[0373] In embodiments, the anti-TSLPR antibodies and antigen-binding fragments include a TSLPR binding domain. In some aspects, the TSLPR binding domain comprises six CDRs (e.g., a vhCDR1, a vhCDR2, a vhCDR3, a vlCDR1, a vlCDR2, and a vlCDR3). In some aspects, the CDRs of the antibody or antigen-binding fragment thereof are annotated according to Chothia, Partome, and/or Kabat numbering.

[0374] In some aspects, the TSLPR binding domain comprises one variable heavy domain/variable light domain (VH/VL) combination that binds TSLPR. In some aspects, the TSLPR binding domain is a single-chain variant fragment (scFv) that binds TSLPR. In embodiments, the antibodies or antigen-binding fragments thereof provided herein exhibit particularly advantageous properties as compared with other antibodies in the art. Such advantageous properties include, but are not limited to: two high affinity binding sites; a long half-life in vivo due to the Ig-like format; high biological activities with very effective leukemia cell killing (such as B cells) due to effective recruitment of immune effector cells and complement to the Fc regions of the antibodies provided herein; and reduced potential for side effects.

[0375] In some aspects, the antibodies have been charge engineered by introducing S293D mutation, 1332E mutation, or both S239D and 1332E mutations in the Fc regions of IgG1 (SEQ ID NO: 226).

### A. TSLPR Binding Domains

[0376] Suitable TSLPR binding domains of the anti-TSLPR antibodies or antigen-binding fragments thereof described herein comprise a variable heavy domain (VH) and a light chain variable domain (VL). In embodiments, the VH and VL is assembled in a Fab format of an Ig-like antibody. In embodiments, the VL and VL is assembled in scFv format. In embodiments, the antibodies or antigen-binding fragments thereof of the disclosure comprise two Fab that are linked to Fc regions to form a IgG-like antibody. Other formats of antibodies or antigen-binding fragments thereof described herein include; IgG-like antibodies comprising two scFv arms with binding sites for TSLPR each linked to an Fc portion; IgG-like antibodies with a Fab arm with a binding site for TSLPR and a scFv arm with a binding site for TSLPR each linked to an Fc portion. Further formats include non-IgG-like antibodies or antigen-binding fragments thereof that comprise two Fab arms with binding sites for TSLPR; two scFv arms with binding sites for TSLPR; or one Fab arm with a binding site for TSLPR and one scFv arm with a binding site for TSLPR but no Fc portions. In embodiments, the antibodies or antigen-binding fragments thereof of the disclosure comprise Fc portions.

[0377] In embodiments, antibodies or antigen-binding fragments provided herein comprise at least one TSLPR binding domain that binds an extracellular part of TSLPR. In embodiments, antibodies or antigen-binding fragments provided herein comprise two TSLPR binding domain that can bind an extracellular part of TSLPR. In embodiments, the TSLPR binding domains bind TSLPR with a Kd that is between 10⁻⁵ M and 10⁻¹¹ M. In embodiments, the variable domains bind TSLPR with a Kd that is between 106 M and 10⁻¹⁰ M. In embodiments, the Kd is between 10⁻⁷ M and 10⁻⁹ M or between 10⁻⁸ M and 10⁻⁹ M.

[0378] In embodiments, the anti-TSLPR antibody or antigen-binding fragment thereof binds to TSLPR with a binding affinity of at least 1×10⁻⁵ M, at least 5×10⁻⁶ M, at least 1×10⁻⁶ M, at least 5×10⁻⁷ M, at least 1×10⁻⁷ M, at least 5×10⁻⁸ M, at least 1×10⁻⁸ M, at least 5×10⁻⁹ M, at least 1×10⁻⁹ M, at least 5×10⁻¹⁰ M, at least 1×10⁻¹⁰ M, at least 5×10⁻¹¹ M, or at least 1×10⁻¹¹ M.

[0379] Aspects of the variable heavy domains and variable light domains of the TSLPR binding domain are further discussed in detail below.

### 1. Variable Heavy Domains

[0380] In embodiments, the anti-TSLPR antibodies or antigen-binding fragments thereof comprise a human TSLPR binding domain comprising a variable heavy domain, wherein the variable heavy domain comprises:
[0381] (a) a vhCDR1 comprising the amino acid sequence SEQ ID NO: 13, a vhCDR2 comprising the amino acid sequence SEQ ID NO: 14, and a vhCDR3 comprising the amino acid sequence SEQ ID NO: 15;
[0382] (b) a vhCDR1 comprising the amino acid sequence SEQ ID NO: 16, a vhCDR2 comprising the amino acid sequence SEQ ID NO: 17, and a vhCDR3 comprising the amino acid sequence SEQ ID NO: 18; or
[0383] (c) a vhCDR1 comprising the amino acid sequence SEQ ID NO: 19, a vhCDR2 comprising the amino acid sequence SEQ ID NO: 20, and a vhCDR3 comprising the amino acid sequence SEQ ID NO: 21.

[0384] In embodiments, the anti-TSLPR antibodies or antigen-binding fragments thereof comprise heavy chain alternate CDRs annotated according to Chothia, Partome, and/or Kabat numbering. In embodiments, the heavy chain CDRs are Custom or Custom2. Exemplary alternate CDRs are provided in Tables 3-5.

TABLE 3
Alternate CDRs for TSLPR-4 Heavy Chain (1A9)
(SEQ ID NO: 9)
TSLPR-4 VH Protein (1A9) SEQ ID NO: 9

| | | | SEQ | | |
|---|---|---|---|---|---|
| | Defi- | Sequence | ID | Resi- | |
| Region | nition | Fragment | NO | dues | Length |
| vhCDR1 | Custom | GYSISSGYYWG | 19 | 26-36 | 11 |
| | Paratome | YSISSGYYWG | 52 | 27-36 | 10 |
| | Chothia | GYSISSGY | 53 | 26-33 | 8 |
| | Custom2 | YSISSGYY | 220 | 27-34 | 8 |
| vhCDR2 | Custom | RIYHSGTTSYNPSLKR | 20 | 51-66 | 16 |
| | Paratome | WIGRIYHSGTTSY | 54 | 48-60 | 13 |
| | Chothia | YHSGT | 55 | 53-57 | 5 |
| vhCDR3 | Custom | NWGGNWFDP | 21 | 99-107 | 9 |
| | Paratome | RNWGGNWFDP | 56 | 98-107 | 10 |
| | Chothia | NWGGNWFDP | 57 | 99-107 | 9 |
| | Custom2 | ARNWGGNWFDP | 221 | 97-107 | 11 |

TABLE 4
Alternate CDRs for TSLPR-6 Heavy Chain (1B7)
(SEQ ID NO: 7)
TSLPR-6 VH Protein (1B7) SEQ ID NO: 7

| | | | SEQ | | |
|---|---|---|---|---|---|
| | Defi- | Sequence | ID | Resi- | |
| Region | nition | Fragment | NO | dues | Length |
| vhCDR1 | Custom | GGSISSSNWWS | 13 | 26-36 | 11 |
| | Paratome | GSISSSNWWS | 40 | 27-36 | 10 |
| | Chothia | GGSISSSN | 41 | 26-33 | 8 |
| vhCDR2 | Custom | EIYHGGTTNNNPSLKS | 14 | 51-66 | 16 |
| | Paratome | WIGEIYHGGTTNN | 42 | 48-60 | 13 |
| | Chothia | YHGGT | 43 | 53-57 | 5 |
| vhCDR3 | Custom | HRYSNGLDY | 15 | 99-107 | 9 |
| | Paratome | RHRYSNGLDY | 44 | 98-107 | 10 |
| | Chothia | HRYSNGLDY | 45 | 99-107 | 9 |
| | Custom2 | ARHRYSNGLDY | 222 | 97-107 | 11 |

TABLE 5
Alternate CDRs for TSLPR-21 Heavy Chain (1C3)
(SEQ ID NO: 8)
TSLPR-21 VH Protein (1C3) SEQ ID NO: 8

| | | | SEQ | | |
|---|---|---|---|---|---|
| | Defi- | Sequence | ID | Resi- | |
| Region | nition | Fragment | NO | dues | Length |
| vhCDR1 | Custom | GYTFSGYYMH | 16 | 26-35 | 10 |
| | Paratome | YTFSGYYMH | 64 | 27-35 | 9 |
| | Chothia | GYTFSGY | 65 | 26-32 | 7 |
| vhCDR2 | Custom | RFNLHGGVADYAQKFQ | 17 | 50-65 | 16 |
| | Paratome | WMGRFNLHGGVADYA | 66 | 47-61 | 15 |
| | Chothia | NLHGGV | 67 | 52-57 | 6 |
| | Custom2 | RFNLHGGVADYAQKFQG | 223 | 50-66 | 17 |
| vhCDR3 | Custom | ERQWLVQDYFDY | 18 | 98-109 | 12 |
| | Paratome | VRERQWLVQDYFDY | 68 | 96-109 | 14 |
| | Chothia | ERQWLVQDYFDY | 69 | 98-109 | 12 |
| | Custom2 | ARERQWLVQDYFDY | 224 | 98-109 | 14 |

[0385] In embodiments, the anti-TSLPR antibodies or antigen-binding fragments thereof comprise a variable heavy domain as disclosed in SEQ ID NOs: 76-93.

[0386] In embodiments, the anti-TSLPR antibodies or antigen-binding fragments thereof comprise heavy chain CDRs as disclosed in Table 9.

[0387] Conservative variations of 1, 2, or 3 amino acid residues from the recited CDR sequences are allowed while retaining the same kind of binding activity (in kind, not necessarily in amount). Hence, the heavy chain CDR 1, 2 and 3 sequences preferably contain sequences that deviate in no more than three, preferably no more than two, preferably no more than one amino acid from the recited CDR sequences. In certain aspects, the heavy chain CDR 1, 2 and 3 sequences are identical to the recited CDR sequences.

[0388] In embodiments, the anti-TSLPR antibody or antigen-binding fragment thereof comprises a human TSLPR binding domain comprising an variable heavy domain that comprises SEQ ID NO: 7, 8, 9, or 76-93.

[0389] In embodiments, the anti-TSLPR antibody or antigen-binding fragment thereof comprises a human TSLPR binding domain comprising an variable heavy domain that comprises an amino acid sequence set forth in SEQ ID NO: 7, 8, 9, or 76-93.

[0390] In embodiments, the anti-TSLPR antibody or antigen-binding fragment thereof comprises an amino acid sequence that is at least 85%, 86%, 87%, 88%, 89%, 90%, 91%, 92%, 93%, 94%, 95%, 95.5%, 96%, 96.5%, 97%, 97.5%, 98%, 98.5%, 99%, or 99.5% identical to the amino acid sequence set forth in SEQ ID NO: 7.

[0391] In embodiments, the anti-TSLPR antibody or antigen-binding fragment thereof comprises an amino acid sequence that is at least 85%, 86%, 87%, 88%, 89%, 90%, 91%, 92%, 93%, 94%, 95%, 95.5%, 96%, 96.5%, 97%, 97.5%, 98%, 98.5%, 99%, or 99.5% identical to the amino acid sequence set forth in SEQ ID NO: 8.

[0392] In embodiments, the anti-TSLPR antibody or antigen-binding fragment thereof comprises an amino acid sequence that is at least 85%, 86%, 87%, 88%, 89%, 90%, 91%, 92%, 93%, 94%, 95%, 95.5%, 96%, 96.5%, 97%, 97.5%, 98%, 98.5%, 99%, or 99.5% identical to the amino acid sequence set forth in SEQ ID NO: 9.

[0393] In embodiments, the anti-TSLPR antibody or antigen-binding fragment thereof comprises an amino acid sequence that is at least 85%, 86%, 87%, 88%, 89%, 90%, 91%, 92%, 93%, 94%, 95%, 95.5%, 96%, 96.5%, 97%, 97.5%, 98%, 98.5%, 99%, or 99.5% identical to the amino acid sequence set forth in SEQ ID NO: 76-93.

[0394] In embodiments, the TSLPR binding domain is a human TSLPR binding domain that comprises a variable heavy domain, wherein the variable heavy domain comprises an amino acid sequence that comprises a vhCDR1 selected from SEQ ID NO: 13, 16, 19, 40, 41, 52, 53, 64, and 65 and wherein the variable heavy domain is at least 80% sequence identical to an amino acid sequence selected from SEQ ID NO: 7, 8, and 9.

[0395] In embodiments, the TSLPR binding domain is a human TSLPR binding domain that comprises a variable heavy domain, wherein the variable heavy domain comprises an amino acid sequence that comprises a vhCDR2 selected from SEQ ID NO: 14, 17, 20, 42, 43, 54, 55, 66, and 67 and wherein the variable heavy domain is at least 80% sequence identical to an amino acid sequence selected from SEQ ID NO: 7, 8, and 9.

[0396] In embodiments, the TSLPR binding domain is a human TSLPR binding domain that comprises a variable heavy domain, wherein the variable heavy domain comprises an amino acid sequence that comprises a vhCDR3 selected from SEQ ID NO: 15, 18, 21, 44, 45, 56, 57, 68, and 69 and wherein the variable heavy domain is at least 80% sequence identical to an amino acid sequence selected from SEQ ID NO: 7, 8, and 9.

[0397] In embodiments, the TSLPR binding domain is a human TSLPR binding domain that comprises a variable heavy domain, wherein the variable heavy domain comprises an amino acid sequence that comprises a vhCDR1 selected from SEQ ID NO: 13, 16, 19, 40, 41, 52, 53, 64, and 65 and wherein the variable heavy domain is at least 85% sequence identical to an amino acid sequence selected from SEQ ID NO: 7, 8, and 9.

[0398] In embodiments, the TSLPR binding domain is a human TSLPR binding domain that comprises a variable heavy domain, wherein the variable heavy domain comprises an amino acid sequence that comprises a vhCDR2 selected from SEQ ID NO: 14, 17, 20, 42, 43, 54, 55, 66, and 67 and wherein the variable heavy domain is at least 85% sequence identical to an amino acid sequence selected from SEQ ID NO: 7, 8, and 9.

[0399] In embodiments, the TSLPR binding domain is a human TSLPR binding domain that comprises a variable heavy domain, wherein the variable heavy domain comprises an amino acid sequence that comprises a vhCDR3 selected from SEQ ID NO: 15, 18, 21, 44, 45, 56, 57, 68, and 69 and wherein the variable heavy domain is at least 85% sequence identical to an amino acid sequence selected from SEQ ID NO: 7, 8, and 9.

[0400] In embodiments, the TSLPR binding domain is a human TSLPR binding domain that comprises a variable heavy domain, wherein the variable heavy domain comprises an amino acid sequence that comprises a vhCDR1 selected from SEQ ID NO: 13, 16, 19, 40, 41, 52, 53, 64, and 65 and wherein the variable heavy domain is at least 90% sequence identical to an amino acid sequence selected from SEQ ID NO: 7, 8, and 9.

[0401] In embodiments, the TSLPR binding domain is a human TSLPR binding domain that comprises a variable heavy domain, wherein the variable heavy domain comprises an amino acid sequence that comprises a vhCDR2 selected from SEQ ID NO: 14, 17, 20, 42, 43, 54, 55, 66, and 67 and wherein the variable heavy domain is at least 90% sequence identical to an amino acid sequence selected from SEQ ID NO: 7, 8, and 9.

[0402] In embodiments, the TSLPR binding domain is a human TSLPR binding domain that comprises a variable heavy domain, wherein the variable heavy domain comprises an amino acid sequence that comprises a vhCDR3 selected from SEQ ID NO: 15, 18, 21, 44, 45, 56, 57, 68, and 69 and wherein the variable heavy domain is at least 90% sequence identical to an amino acid sequence selected from SEQ ID NO: 7, 8, and 9.

[0403] In embodiments, the TSLPR binding domain is a human TSLPR binding domain that comprises a variable heavy domain, wherein the variable heavy domain comprises an amino acid sequence that comprises a vhCDR1 selected from SEQ ID NO: 13, 16, 19, 40, 41, 52, 53, 64, and 65 and wherein the variable heavy domain is at least 95% sequence identical to an amino acid sequence selected from SEQ ID NO: 7, 8, and 9.

[0404] In embodiments, the TSLPR binding domain is a human TSLPR binding domain that comprises a variable heavy domain, wherein the variable heavy domain comprises an amino acid sequence that comprises a vhCDR2 selected from SEQ ID NO: 14, 17, 20, 42, 43, 54, 55, 66, and 67 and wherein the variable heavy domain is at least 95% sequence identical to an amino acid sequence selected from SEQ ID NO: 7, 8, and 9.

[0405] In embodiments, the TSLPR binding domain is a human TSLPR binding domain that comprises a variable heavy domain, wherein the variable heavy domain comprises an amino acid sequence that comprises a vhCDR3 selected from SEQ ID NO: 15, 18, 21, 44, 45, 56, 57, 68, and 69 and wherein the variable heavy domain is at least 95% sequence identical to an amino acid sequence selected from SEQ ID NO: 7, 8, and 9.

[0406] In embodiments, the TSLPR binding domain is a human TSLPR binding domain that comprises a variable heavy domain, wherein the variable heavy domain comprises an amino acid sequence that comprises a vhCDR1 selected from SEQ ID NO: 13, 16, 19, 40, 41, 52, 53, 64, and 65 and wherein the variable heavy domain is at least 96% sequence identical to an amino acid sequence selected from SEQ ID NO: 7, 8, and 9.

[0407] In embodiments, the TSLPR binding domain is a human TSLPR binding domain that comprises a variable heavy domain, wherein the variable heavy domain comprises an amino acid sequence that comprises a vhCDR2 selected from SEQ ID NO: 14, 17, 20, 42, 43, 54, 55, 66, and 67 and wherein the variable heavy domain is at least 96% sequence identical to an amino acid sequence selected from SEQ ID NO: 7, 8, and 9.

[0408] In embodiments, the TSLPR binding domain is a human TSLPR binding domain that comprises a variable heavy domain, wherein the variable heavy domain comprises an amino acid sequence that comprises a vhCDR3 selected from SEQ ID NO: 15, 18, 21, 44, 45, 56, 57, 68, and 69 and wherein the variable heavy domain is at least 96% sequence identical to an amino acid sequence selected from SEQ ID NO: 7, 8, and 9.

[0409] In embodiments, the TSLPR binding domain is a human TSLPR binding domain that comprises a variable heavy domain, wherein the variable heavy domain comprises an amino acid sequence that comprises a vhCDR1 selected from SEQ ID NO: 13, 16, 19, 40, 41, 52, 53, 64, and 65 and wherein the variable heavy domain is at least 97% sequence identical to an amino acid sequence selected from SEQ ID NO: 7, 8, and 9.

[0410] In embodiments, the TSLPR binding domain is a human TSLPR binding domain that comprises a variable heavy domain, wherein the variable heavy domain comprises an amino acid sequence that comprises a vhCDR2 selected from SEQ ID NO: 14, 17, 20, 42, 43, 54, 55, 66, and 67 and wherein the variable heavy domain is at least 97% sequence identical to an amino acid sequence selected from SEQ ID NO: 7, 8, and 9.

[0411] In embodiments, the TSLPR binding domain is a human TSLPR binding domain that comprises a variable heavy domain, wherein the variable heavy domain comprises an amino acid sequence that comprises a vhCDR3 selected from SEQ ID NO: 15, 18, 21, 44, 45, 56, 57, 68, and 69 and wherein the variable heavy domain is at least 97% sequence identical to an amino acid sequence selected from SEQ ID NO: 7, 8, and 9.

[0412] In embodiments, the TSLPR binding domain is a human TSLPR binding domain that comprises a variable heavy domain, wherein the variable heavy domain comprises an amino acid sequence that comprises a vhCDR1 selected from SEQ ID NO: 13, 16, 19, 40, 41, 52, 53, 64, and 65 and wherein the variable heavy domain is at least 98% sequence identical to an amino acid sequence selected from SEQ ID NO: 7, 8, and 9.

[0413] In embodiments, the TSLPR binding domain is a human TSLPR binding domain that comprises a variable heavy domain, wherein the variable heavy domain comprises an amino acid sequence that comprises a vhCDR2 selected from SEQ ID NO: 14, 17, 20, 42, 43, 54, 55, 66, and 67 and wherein the variable heavy domain is at least 98% sequence identical to an amino acid sequence selected from SEQ ID NO: 7, 8, and 9.

[0414] In embodiments, the TSLPR binding domain is a human TSLPR binding domain that comprises a variable heavy domain, wherein the variable heavy domain comprises an amino acid sequence that comprises a vhCDR3 selected from SEQ ID NO: 15, 18, 21, 44, 45, 56, 57, 68, and 69 and wherein the variable heavy domain is at least 98% sequence identical to an amino acid sequence selected from SEQ ID NO: 7, 8, and 9.

[0415] In embodiments, the TSLPR binding domain is a human TSLPR binding domain that comprises a variable heavy domain, wherein the variable heavy domain comprises an amino acid sequence that comprises a vhCDR1 selected from SEQ ID NO: 13, 16, 19, 40, 41, 52, 53, 64, and 65 and a vhCDR2 selected from SEQ ID NO: 14, 17, 20, 42, 43, 54, 55, 66, and 67 and a vhCDR3 selected from SEQ ID NO: 15, 18, 21, 44, 45, 56, 57, 68, and 69, wherein the variable heavy domain is at least 80% sequence identical to an amino acid sequence selected from SEQ ID NO: 7, 8, and 9.

[0416] In embodiments, the TSLPR binding domain is a human TSLPR binding domain that comprises a variable heavy domain, wherein the variable heavy domain comprises an amino acid sequence that comprises a vhCDR1 selected from SEQ ID NO: 13, 16, 19, 40, 41, 52, 53, 64, and 65 and a vhCDR2 selected from SEQ ID NO: 14, 17, 20, 42, 43, 54, 55, 66, and 67 and a vhCDR3 selected from SEQ ID NO: 15, 18, 21, 44, 45, 56, 57, 68, and 69, wherein the variable heavy domain is at least 85% sequence identical to an amino acid sequence selected from SEQ ID NO: 7, 8, and 9.

[0417] In embodiments, the TSLPR binding domain is a human TSLPR binding domain that comprises a variable heavy domain, wherein the variable heavy domain comprises an amino acid sequence that comprises a vhCDR1 selected from SEQ ID NO: 13, 16, 19, 40, 41, 52, 53, 64, and 65 and a vhCDR2 selected from SEQ ID NO: 14, 17, 20, 42, 43, 54, 55, 66, and 67 and a vhCDR3 selected from SEQ ID NO: 15, 18, 21, 44, 45, 56, 57, 68, and 69, wherein the variable heavy domain is at least 90% sequence identical to an amino acid sequence selected from SEQ ID NO: 7, 8, and 9.

[0418] In embodiments, the TSLPR binding domain is a human TSLPR binding domain that comprises a variable heavy domain, wherein the variable heavy domain comprises an amino acid sequence that comprises a vhCDR1 selected from SEQ ID NO: 13, 16, 19, 40, 41, 52, 53, 64, and 65 and a vhCDR2 selected from SEQ ID NO: 14, 17, 20, 42, 43, 54, 55, 66, and 67 and a vhCDR3 selected from SEQ ID NO: 15, 18, 21, 44, 45, 56, 57, 68, and 69, wherein the variable heavy domain is at least 91% sequence identical to an amino acid sequence selected from SEQ ID NO: 7, 8, and 9.

[0419] In embodiments, the TSLPR binding domain is a human TSLPR binding domain that comprises a variable heavy domain, wherein the variable heavy domain comprises an amino acid sequence that comprises a vhCDR1 selected from SEQ ID NO: 13, 16, 19, 40, 41, 52, 53, 64, and 65 and a vhCDR2 selected from SEQ ID NO: 14, 17, 20, 42, 43, 54, 55, 66, and 67 and a vhCDR3 selected from SEQ ID NO: 15, 18, 21, 44, 45, 56, 57, 68, and 69, wherein the variable heavy domain is at least 92% sequence identical to an amino acid sequence selected from SEQ ID NO: 7, 8, and 9.

[0420] In embodiments, the TSLPR binding domain is a human TSLPR binding domain that comprises a variable heavy domain, wherein the variable heavy domain comprises an amino acid sequence that comprises a vhCDR1 selected from SEQ ID NO: 13, 16, 19, 40, 41, 52, 53, 64, and 65 and a vhCDR2 selected from SEQ ID NO: 14, 17, 20, 42, 43, 54, 55, 66, and 67 and a vhCDR3 selected from SEQ ID NO: 15, 18, 21, 44, 45, 56, 57, 68, and 69, wherein the variable heavy domain is at least 93% sequence identical to an amino acid sequence selected from SEQ ID NO: 7, 8, and 9.

[0421] In embodiments, the TSLPR binding domain is a human TSLPR binding domain that comprises a variable heavy domain, wherein the variable heavy domain comprises an amino acid sequence that comprises a vhCDR1 selected from SEQ ID NO: 13, 16, 19, 40, 41, 52, 53, 64, and 65 and a vhCDR2 selected from SEQ ID NO: 14, 17, 20, 42, 43, 54, 55, 66, and 67 and a vhCDR3 selected from SEQ ID NO: 15, 18, 21, 44, 45, 56, 57, 68, and 69, wherein the variable heavy domain is at least 94% sequence identical to an amino acid sequence selected from SEQ ID NO: 7, 8, and 9.

[0422] In embodiments, the TSLPR binding domain is a human TSLPR binding domain that comprises a variable heavy domain, wherein the variable heavy domain comprises an amino acid sequence that comprises a vhCDR1 selected from SEQ ID NO: 13, 16, 19, 40, 41, 52, 53, 64, and 65 and a vhCDR2 selected from SEQ ID NO: 14, 17, 20, 42, 43, 54, 55, 66, and 67 and a vhCDR3 selected from SEQ ID NO: 15, 18, 21, 44, 45, 56, 57, 68, and 69, wherein the variable heavy domain is at least 95% sequence identical to an amino acid sequence selected from SEQ ID NO: 7, 8, and 9.

[0423] In embodiments, the TSLPR binding domain is a human TSLPR binding domain that comprises a variable heavy domain, wherein the variable heavy domain comprises an amino acid sequence that comprises a vhCDR1 selected from SEQ ID NO: 13, 16, 19, 40, 41, 52, 53, 64, and 65 and a vhCDR2 selected from SEQ ID NO: 14, 17, 20, 42, 43, 54, 55, 66, and 67 and a vhCDR3 selected from SEQ ID NO: 15, 18, 21, 44, 45, 56, 57, 68, and 69, wherein the variable heavy domain is at least 96% sequence identical to an amino acid sequence selected from SEQ ID NO: 7, 8, and 9.

[0424] In embodiments, the antibody or antigen-binding fragment thereof of the disclosure comprises an amino acid sequence set forth in SEQ ID NO: 7, 8, 9, or 76-93.

[0425] In embodiments, the antibody or antigen-binding fragment thereof comprises an amino acid sequence that is at least 85%, 86%, 87%, 88%, 89%, 90%, 91%, 92%, 93%, 94%, 95%, 95.5%, 96%, 96.5%, 97%, 97.5%, 98%, 98.5%, 99%, or 99.5% identical to the amino acid sequence set forth in SEQ ID NO: 7.

[0426] In embodiments, the antibody or antigen-binding fragment thereof comprises an amino acid sequence that is at least 85%, 86%, 87%, 88%, 89%, 90%, 91%, 92%, 93%, 94%, 95%, 95.5%, 96%, 96.5%, 97%, 97.5%, 98%, 98.5%, 99%, or 99.5% identical to the amino acid sequence set forth in SEQ ID NO: 8.

[0427] In embodiments, the antibody or antigen-binding fragment thereof comprises an amino acid sequence that is at least 85%, 86%, 87%, 88%, 89%, 90%, 91%, 92%, 93%, 94%, 95%, 95.5%, 96%, 96.5%, 97%, 97.5%, 98%, 98.5%, 99%, or 99.5% identical to the amino acid sequence set forth in SEQ ID NO: 9.

[0428] In embodiments, the antibody or antigen-binding fragment thereof comprises an amino acid sequence that is at least 85%, 86%, 87%, 88%, 89%, 90%, 91%, 92%, 93%, 94%, 95%, 95.5%, 96%, 96.5%, 97%, 97.5%, 98%, 98.5%, 99%, or 99.5% identical to the amino acid sequence set forth in SEQ ID NO: 76-93.

[0429] In embodiments, the antibody or antigen-binding fragment thereof comprises a variable heavy domain that comprises an amino acid sequence that comprises a vhCDR1 selected from SEQ ID NO: 13, 16, 19, 40, 41, 52, 53, 64, and 65 and wherein the variable heavy domain is at least 80% sequence identical to an amino acid sequence selected from SEQ ID NO: 7, 8, and 9.

[0430] In embodiments, the antibody or antigen-binding fragment thereof comprises a variable heavy domain that comprises an amino acid sequence that comprises a vhCDR2 selected from SEQ ID NO: 14, 17, 20, 42, 43, 54, 55, 66, and 67 and wherein the variable heavy domain is at least 80% sequence identical to an amino acid sequence selected from SEQ ID NO: 7, 8, and 9.

[0431] In embodiments, the antibody or antigen-binding fragment thereof comprises a variable heavy domain that comprises an amino acid sequence that comprises a vhCDR3 selected from SEQ ID NO: 15, 18, 21, 44, 45, 56, 57, 68, and 69 and wherein the variable heavy domain is at least 80% sequence identical to an amino acid sequence selected from SEQ ID NO: 7, 8, and 9.

[0432] In embodiments, the antibody or antigen-binding fragment thereof comprises a variable heavy domain that comprises an amino acid sequence that comprises a vhCDR1 selected from SEQ ID NO: 13, 16, 19, 40, 41, 52, 53, 64, and 65 and wherein the variable heavy domain is at least 85% sequence identical to an amino acid sequence selected from SEQ ID NO: 7, 8, and 9.

[0433] In embodiments, the antibody or antigen-binding fragment thereof comprises a variable heavy domain that comprises an amino acid sequence that comprises a vhCDR2 selected from SEQ ID NO: 14, 17, 20, 42, 43, 54, 55, 66, and 67 and wherein the variable heavy domain is at least 85% sequence identical to an amino acid sequence selected from SEQ ID NO: 7, 8, and 9.

[0434] In embodiments, antibody or antigen-binding fragment thereof comprises a variable heavy domain that comprises an amino acid sequence that comprises a vhCDR3 selected from SEQ ID NO: 15, 18, 21, 44, 45, 56, 57, 68, and 69 and wherein the variable heavy domain is at least 85% sequence identical to an amino acid sequence selected from SEQ ID NO: 7, 8, and 9.

[0435] In embodiments, the antibody or antigen-binding fragment thereof comprises a variable heavy domain that comprises an amino acid sequence that comprises a vhCDR1 selected from SEQ ID NO: 13, 16, 19, 40, 41, 52, 53, 64, and 65 and wherein the variable heavy domain is at least 90% sequence identical to an amino acid sequence selected from SEQ ID NO: 7, 8, and 9.

[0436] In embodiments, the antibody or antigen-binding fragment thereof comprises a variable heavy domain that comprises an amino acid sequence that comprises a vhCDR2 selected from SEQ ID NO: 14, 17, 20, 42, 43, 54, 55, 66, and 67 and wherein the variable heavy domain is at least 90% sequence identical to an amino acid sequence selected from SEQ ID NO: 7, 8, and 9.

[0437] In embodiments, the antibody or antigen-binding fragment thereof comprises a variable heavy domain that comprises an amino acid sequence that comprises a vhCDR3 selected from SEQ ID NO: 15, 18, 21, 44, 45, 56, 57, 68, and 69 and wherein the variable heavy domain is at least 90% sequence identical to an amino acid sequence selected from SEQ ID NO: 7, 8, and 9.

[0438] In embodiments, the antibody or antigen-binding fragment thereof comprises a variable heavy domain that comprises an amino acid sequence that comprises a vhCDR1 selected from SEQ ID NO: 13, 16, 19, 40, 41, 52, 53, 64, and 65 and wherein the variable heavy domain is at least 95% sequence identical to an amino acid sequence selected from SEQ ID NO: 7, 8, and 9.

[0439] In embodiments, the antibody or antigen-binding fragment thereof comprises a variable heavy domain that comprises an amino acid sequence that comprises a vhCDR2 selected from SEQ ID NO: 14, 17, 20, 42, 43, 54, 55, 66, and 67 and wherein the variable heavy domain is at least 95% sequence identical to an amino acid sequence selected from SEQ ID NO: 7, 8, and 9.

[0440] In embodiments, the antibody or antigen-binding fragment thereof comprises a variable heavy domain that comprises an amino acid sequence that comprises a vhCDR3 selected from SEQ ID NO: 15, 18, 21, 44, 45, 56, 57, 68, and 69 and wherein the variable heavy domain is at least 95% sequence identical to an amino acid sequence selected from SEQ ID NO: 7, 8, and 9.

[0441] In embodiments, the antibody or antigen-binding fragment thereof comprises a variable heavy domain that comprises an amino acid sequence that comprises a vhCDR1 selected from SEQ ID NO: 13, 16, 19, 40, 41, 52, 53, 64, and 65 and wherein the variable heavy domain is at least 96% sequence identical to an amino acid sequence selected from SEQ ID NO: 7, 8, and 9.

[0442] In embodiments, the antibody or antigen-binding fragment thereof comprises a variable heavy domain that comprises an amino acid sequence that comprises a vhCDR2 selected from SEQ ID NO: 14, 17, 20, 42, 43, 54, 55, 66, and 67 and wherein the variable heavy domain is at least 96% sequence identical to an amino acid sequence selected from SEQ ID NO: 7, 8, and 9.

[0443] In embodiments, the antibody or antigen-binding fragment thereof comprises a variable heavy domain that comprises an amino acid sequence that comprises a vhCDR3 selected from SEQ ID NO: 15, 18, 21, 44, 45, 56, 57, 68, and 69 and wherein the variable heavy domain is at least 96% sequence identical to an amino acid sequence selected from SEQ ID NO: 7, 8, and 9.

[0444] Variations of 1, 2 or 3 amino acid residues from the recited CDR sequences are allowed while retaining the same kind of binding activity (in kind, not necessarily in amount). Hence, the heavy chain CDR 1, 2 and 3 sequences preferably contain sequences that deviate in no more than three, preferably no more than two, more preferably no more than one amino acid from the recited CDR sequences. In certain aspects, the heavy chain CDR 1, 2 and 3 sequences are identical to the recited CDR sequences.

[0445] In embodiments, the variable heavy domain of the antibody or antigen-binding fragment thereof that binds human TSLPR can have from 0 to 10, preferably from 0 to 5 amino acid insertions, deletions, substitutions, additions in the sequence of the variable heavy domain outside of the three CDR sequences, or a combination thereof. In embodiments, the variable heavy domain comprises from 0 to 9, from 0 to 8, from 0 to 7, from 0 to 6, from 0 to 5, from 0 to 4, preferably from 0 to 3, preferably from 0 to 2, preferably from 0 to 1 and preferably 0 amino acid insertions, deletions, substitutions, additions with respect to the indicated amino acid sequence, or a combination thereof.

[0446] In certain aspects, the TSLPR binding domain is a human TSLPR binding domain that comprises a variable heavy domain, wherein the variable heavy domain comprises:
[0447] (i) a vhCDR1 comprising the amino acid sequence SEQ ID NO: 13, a vhCDR2 comprising the amino acid sequence SEQ ID NO: 14, and a vhCDR3 comprising the amino acid sequence SEQ ID NO: 15;
[0448] (ii) a vhCDR1 comprising the amino acid sequence SEQ ID NO: 16, a vhCDR2 comprising the amino acid sequence SEQ ID NO: 17, and a vhCDR3 comprising the amino acid sequence SEQ ID NO: 18; or
[0449] (iii) a vhCDR1 comprising the amino acid sequence SEQ ID NO: 19, a vhCDR2 comprising the amino acid sequence SEQ ID NO: 20, and a vhCDR3 comprising the amino acid sequence SEQ ID NO: 21.

[0450] In certain aspects, the TSLPR binding domain is a human TSLPR binding domain that comprises a variable heavy domain, wherein the variable heavy domain comprises:
[0451] (i) a vhCDR1 comprising the amino acid sequence SEQ ID NO: 40, a vhCDR2 comprising the amino acid sequence SEQ ID NO: 42, and a vhCDR3 comprising the amino acid sequence SEQ ID NO: 44;
[0452] (ii) a vhCDR1 comprising the amino acid sequence SEQ ID NO: 64, a vhCDR2 comprising the amino acid sequence SEQ ID NO: 66, and a vhCDR3 comprising the amino acid sequence SEQ ID NO: 68; or
[0453] (iii) a vhCDR1 comprising the amino acid sequence SEQ ID NO: 52, a vhCDR2 comprising the amino acid sequence SEQ ID NO: 54, and a vhCDR3 comprising the amino acid sequence SEQ ID NO: 56.

[0454] In certain aspects, the TSLPR binding domain is a human TSLPR binding domain that comprises a variable heavy domain, wherein the variable heavy domain comprises:
[0455] (i) a vhCDR1 comprising the amino acid sequence SEQ ID NO: 41, a vhCDR2 comprising the amino acid sequence SEQ ID NO: 43, and a vhCDR3 comprising the amino acid sequence SEQ ID NO: 45;
[0456] (ii) a vhCDR1 comprising the amino acid sequence SEQ ID NO: 65, a vhCDR2 comprising the amino acid sequence SEQ ID NO: 67, and a vhCDR3 comprising the amino acid sequence SEQ ID NO: 69; or
[0457] (iii) a vhCDR1 comprising the amino acid sequence SEQ ID NO: 53, a vhCDR2 comprising the amino acid sequence SEQ ID NO: 55, and a vhCDR3 comprising the amino acid sequence SEQ ID NO: 57.

[0458] In certain embodiments, the TSLPR binding domain is a human TSLPR binding domain that comprises a variable heavy domain, wherein the VH region comprises a vhCDR1 comprising the amino acid sequence SEQ ID NO: 13, a vhCDR2 comprising the amino acid sequence SEQ ID NO: 14, and a vhCDR3 comprising the amino acid sequence SEQ ID NO: 15.

[0459] In certain embodiments, the TSLPR binding domain is a human TSLPR binding domain that comprises a variable heavy domain, wherein the amino acid sequence of the VH region is selected from SEQ ID NO: 7, 8, and 9.

[0460] In some embodiments, the variable heavy domain is encoded by a polynucleotide comprising SEQ ID NO: 34, 35, or 36.

### 2. Variable Light Domains

[0461] In embodiments, the anti-TSLPR antibody or antigen-binding fragment thereof comprises a variable light domain that binds human TSLPR, wherein the variable light domain comprises an amino acid sequence that is at least 85%, 86%, 87%, 88%, 89%, 90%, 91%, 92%, 93%, 94%, 95%, 95.5%, 96%, 96.5%, 97%, 97.5%, 98%, 98.5%, 99%, or 99.5% identical to an amino acid sequence comprising SEQ ID NO: 10.

[0462] In embodiments, the TSLPR binding domain is a human TSLPR binding domain that comprises a variable light domain, wherein the variable light domain comprises an amino acid sequence that is at least 85%, 86%, 87%, 88%, 89%, 90%, 91%, 92%, 93%, 94%, 95%, 95.5%, 96%, 96.5%, 97%, 97.5%, 98%, 98.5%, 99%, or 99.5% identical to an amino acid sequence comprising SEQ ID NO: 11.

[0463] In embodiments, the TSLPR binding domain is a human TSLPR binding domain that comprises a variable light domain, wherein the variable light domain comprises an amino acid sequence that is at least 85%, 86%, 87%, 88%, 89%, 90%, 91%, 92%, 93%, 94%, 95%, 95.5%, 96%, 96.5%, 97%, 97.5%, 98%, 98.5%, 99%, or 99.5% identical to an amino acid sequence comprising SEQ ID NO: 12.

[0464] In embodiments, the TSLPR binding domain is a human TSLPR binding domain that comprises a variable light domain, wherein the variable light domain comprises an amino acid sequence that is at least 85%, 86%, 87%, 88%, 89%, 90%, 91%, 92%, 93%, 94%, 95%, 95.5%, 96%, 96.5%, 97%, 97.5%, 98%, 98.5%, 99%, or 99.5% identical to the amino acid sequence set forth in SEQ ID NO: 10.

[0465] In embodiments, the TSLPR binding domain is a human TSLPR binding domain that comprises a variable light domain, wherein the variable light domain comprises an amino acid sequence that is at least 85%, 86%, 87%, 88%, 89%, 90%, 91%, 92%, 93%, 94%, 95%, 95.5%, 96%, 96.5%, 97%, 97.5%, 98%, 98.5%, 99%, or 99.5% identical to the amino acid sequence set forth in SEQ ID NO: 11.

[0466] In embodiments, the TSLPR binding domain is a human TSLPR binding domain that comprises a variable light domain, wherein the variable light domain comprises an amino acid sequence that is at least 85%, 86%, 87%, 88%, 89%, 90%, 91%, 92%, 93%, 94%, 95%, 95.5%, 96%, 96.5%, 97%, 97.5%, 98%, 98.5%, 99%, or 99.5% identical to the amino acid sequence set forth in SEQ ID NO: 12.

[0467] In embodiments, the anti-TSLPR antibody or antigen-binding fragment thereof comprises light chain alternate CDRs annotated according to Chothia, Partome, and/or Kabat numbering. Exemplary alternate CDRs are provided in Tables 6-8.

TABLE 6
Alternate CDRs for TSLPR-4 Light Chain (1A9)
(SEQ ID NO: 12)
TSLPR-4 VL Protein (1A9) SEQ ID NO: 12

| | | | SEQ | | |
|---|---|---|---|---|---|
| | Defi- | Sequence | ID | Resi- | |
| Region | nition | Fragment | NO | dues | Length |
| VlCDR1 | Custom | RASQSVSSYLA | 28 | 24-34 | 11 |
| | Paratome | QSVSSYLA | 58 | 27-34 | 8 |
| | Chothia | RASQSVSSYLA | 59 | 24-34 | 11 |
| VlCDR2 | Custom | DASNRAT | 29 | 50-56 | 7 |
| | Paratome | LLIYDASNRAT | 60 | 46-56 | 11 |
| | Chothia | DASNRAT | 61 | 50-56 | 7 |
| VlCDR3 | Custom | QQRSTWLT | 30 | 89-96 | 8 |
| | Paratome | QQRSTWL | 62 | 89-95 | 7 |
| | Chothia | QQRSTWLT | 63 | 89-96 | 8 |

TABLE 7
Alternate CDRs for TSLPR-6 Light Chain (1B7)
(SEQ ID NO: 10)
TSLPR-6 VL Protein (1B7) SEQ ID NO: 10

| | | | SEQ | | |
|---|---|---|---|---|---|
| | Defi- | Sequence | ID | Resi- | |
| Region | nition | Fragment | NO | dues | Length |
| VlCDR1 | Custom | RASQSISNWLA | 22 | 24-34 | 11 |
| | Paratome | QSISNWLA | 46 | 27-34 | 8 |
| | Chothia | RASQSISNWLA | 47 | 24-34 | 11 |
| VlCDR2 | Custom | KASSLES | 23 | 50-56 | 7 |
| | Paratome | LLIYKASSLES | 48 | 46-56 | 11 |
| | Chothia | KASSLES | 49 | 50-56 | 7 |
| VlCDR3 | Custom | QQYNHYST | 24 | 89-96 | 8 |
| | Paratome | QQYNHYS | 50 | 89-95 | 7 |
| | Chothia | QQYNHYST | 51 | 89-96 | 8 |

TABLE 8
Alternate CDRs for TSLPR-21 Light Chain (1C3)
(SEQ ID NO: 11)
TSLPR-21 VL Protein (1C3) SEQ ID NO: 11

| | | | SEQ | | |
|---|---|---|---|---|---|
| | Defi- | Sequence | ID | Resi- | |
| Region | nition | Fragment | NO | dues | Length |
| VlCDR1 | Custom | RASQSISRSLN | 25 | 24-34 | 11 |
| | Paratome | QSISRSLN | 70 | 27-34 | 8 |
| | Chothia | RASQSISRSLN | 71 | 24-34 | 11 |
| VlCDR2 | Custom | AASSLQS | 26 | 50-56 | 7 |
| | Paratome | LLIYAASSLQS | 72 | 46-56 | 11 |
| | Chothia | AASSLQS | 73 | 50-56 | 7 |
| VlCDR3 | Custom | QQSYSISVT | 27 | 89-97 | 9 |
| | Paratome | QQSYSISV | 74 | 89-96 | 8 |
| | Chothia | QQSYSISVT | 75 | 89-97 | 9 |

[0468] In embodiments, the anti-TSLPR antibodies or antigen-binding fragments thereof comprise a variable light domain as disclosed in SEQ ID NO: 148-165.

[0469] As will be appreciated in the art, the junction between the VL and CL has been defined differently, including starting at position 110 (EU numbering) or position 108 (EU numbering), and the variable light chain sequences herein can include V, VA, VAA or VAAP. SEQ ID NO: 12 includes amino acids VAAP from the light chain constant domain. The variable light chain of TSLPR antibody 1A9 does not include amino acids VAAP from the light chain constant domain CLI region and is disclosed in SEQ ID NO: 227.

[0470] SEQ ID NO: 10 includes amino acids VAAP from the light chain constant domain. The variable light chain of TSLPR antibody 1B7 does not include amino acids VAAP from the light chain constant domain CLI region and is disclosed in SEQ ID NO: 228.

[0471] SEQ ID NO: 11 includes amino acids VAAP from the light chain constant domain. The variable light chain of TSLPR antibody 1C3 does not include amino acids VAAP from the light chain constant domain CLI region and is disclosed in SEQ ID NO: 229.

[0472] In embodiments, the anti-TSLPR antibodies or antigen-binding fragments thereof comprise light chain CDRs as disclosed in Table 10.

[0473] Conservative variations of 1, 2, or 3 amino acid residues from the recited CDR sequences are allowed while retaining the same kind of binding activity (in kind, not necessarily in amount). Hence, the light chain CDR 1, 2, and 3 sequences preferably contain sequences that deviate in no more than three, preferably no more than two, preferably no more than one amino acid from the recited CDR sequences. In certain aspects, the light chain CDR 1, 2 and 3 sequences are identical to the recited CDR sequences.

[0474] In embodiments, the TSLPR binding domain is a human TSLPR binding domain that comprises a variable light domain and comprises an amino acid sequence comprising SEQ ID NO: 10, 11, 12, 148-165, or 227-229.

[0475] In embodiments, the TSLPR binding domain is a human TSLPR binding domain that comprises a variable light domain, wherein the variable light domain comprises an amino acid sequence set forth in SEQ ID NO: 10, 11, 12, 148-165, or 227-229.

[0476] In embodiments, the TSLPR binding domain is a human TSLPR binding domain that comprises a variable light domain, wherein the variable light domain comprises an amino acid sequence that comprises a vlCDR1 selected from SEQ ID NO: 22, 25, 28, 46, 47, 58, 59, 70, and 71 and wherein the variable light domain is at least 80% sequence identical to an amino acid sequence selected from SEQ ID NO: 10, 11, and 12.

[0477] In embodiments, the TSLPR binding domain is a human TSLPR binding domain that comprises a variable light domain, wherein the variable light domain comprises an amino acid sequence that comprises a vlCDR2 selected from SEQ ID NO: 23, 26, 29, 48, 49, 60, 61, 72, and 73 and wherein the variable light domain is at least 80% sequence identical to an amino acid sequence selected from SEQ ID NO: 10, 11, and 12.

[0478] In embodiments, the TSLPR binding domain is a human TSLPR binding domain that comprises a variable light domain, wherein the variable light domain comprises an amino acid sequence that comprises a vlCDR3 selected from SEQ ID NO: 24, 27, 30, 50, 51, 62, 63, 74, and 75 and wherein the variable light domain is at least 80% sequence identical to an amino acid sequence selected from SEQ ID NO: 10, 11, and 12.

[0479] In embodiments, the TSLPR binding domain is a human TSLPR binding domain that comprises a variable light domain, wherein the variable light domain comprises an amino acid sequence that comprises a vlCDR1 selected from SEQ ID NO: 22, 25, 28, 46, 47, 58, 59, 70, and 71 and wherein the variable light domain is at least 85% sequence identical to an amino acid sequence selected from SEQ ID NO: 10, 11, and 12.

[0480] In embodiments, the TSLPR binding domain is a human TSLPR binding domain that comprises a variable light domain, wherein the variable light domain comprises an amino acid sequence that comprises a vlCDR2 selected from SEQ ID NO: 23, 26, 29, 48, 49, 60, 61, 72, and 73 and wherein the variable light domain is at least 85% sequence identical to an amino acid sequence selected from SEQ ID NO: 10, 11, and 12.

[0481] In embodiments, the TSLPR binding domain is a human TSLPR binding domain that comprises a variable light domain, wherein the variable light domain comprises an amino acid sequence that comprises a vlCDR3 selected from SEQ ID NO: 24, 27, 30, 50, 51, 62, 63, 74, and 75 and wherein the variable light domain is at least 85% sequence identical to an amino acid sequence selected from SEQ ID NO: 10, 11, and 12.

[0482] In embodiments, the TSLPR binding domain is a human TSLPR binding domain that comprises a variable light domain, wherein the variable light domain comprises an amino acid sequence that comprises a vlCDR1 selected from SEQ ID NO: 22, 25, 28, 46, 47, 58, 59, 70, and 71 and wherein the variable light domain is at least 90% sequence identical to an amino acid sequence selected from SEQ ID NO: 10, 11, and 12.

[0483] In embodiments, the TSLPR binding domain is a human TSLPR binding domain that comprises a variable light domain, wherein the variable light domain comprises an amino acid sequence that comprises a vlCDR2 selected from SEQ ID NO: 23, 26, 29, 48, 49, 60, 61, 72, and 73 and wherein the variable light domain is at least 90% sequence identical to an amino acid sequence selected from SEQ ID NO: 10, 11, and 12.

[0484] In embodiments, the TSLPR binding domain is a human TSLPR binding domain that comprises a variable light domain, wherein the variable light domain comprises an amino acid sequence that comprises a vlCDR3 selected from SEQ ID NO: 24, 27, 30, 50, 51, 62, 63, 74, and 75 and wherein the variable light domain is at least 90% sequence identical to an amino acid sequence selected from SEQ ID NO: 10, 11, and 12.

[0485] In embodiments, the TSLPR binding domain is a human TSLPR binding domain that comprises a variable light domain, wherein the variable light domain comprises an amino acid sequence that comprises a vlCDR1 selected from SEQ ID NO: 22, 25, 28, 46, 47, 58, 59, 70, and 71 and wherein the variable light domain is at least 95% sequence identical to an amino acid sequence selected from SEQ ID NO: 10, 11, and 12.

[0486] In embodiments, the TSLPR binding domain is a human TSLPR binding domain that comprises a variable light domain, wherein the variable light domain comprises an amino acid sequence that comprises a vlCDR2 selected from SEQ ID NO: 23, 26, 29, 48, 49, 60, 61, 72, and 73 and wherein the variable light domain is at least 95% sequence identical to an amino acid sequence selected from SEQ ID NO: 10, 11, and 12.

[0487] In embodiments, the TSLPR binding domain is a human TSLPR binding domain that comprises a variable light domain, wherein the variable light domain comprises an amino acid sequence that comprises a vlCDR3 selected from SEQ ID NO: 24, 27, 30, 50, 51, 62, 63, 74, and 75 and wherein the variable light domain is at least 95% sequence identical to an amino acid sequence selected from SEQ ID NO: 10, 11, and 12.

[0488] In embodiments, the TSLPR binding domain is a human TSLPR binding domain that comprises a variable light domain, wherein the variable light domain comprises an amino acid sequence that comprises a vlCDR1 selected from SEQ ID NO: 22, 25, 28, 46, 47, 58, 59, 70, and 71 and wherein the variable light domain is at least 96% sequence identical to an amino acid sequence selected from SEQ ID NO: 10, 11, and 12.

[0489] In embodiments, the TSLPR binding domain is a human TSLPR binding domain that comprises a variable light domain, wherein the variable light domain comprises an amino acid sequence that comprises a vlCDR2 selected from SEQ ID NO: 23, 26, 29, 48, 49, 60, 61, 72, and 73 and wherein the variable light domain is at least 96% sequence identical to an amino acid sequence selected from SEQ ID NO: 10, 11, and 12.

[0490] In embodiments, the TSLPR binding domain is a human TSLPR binding domain that comprises a variable light domain, wherein the variable light domain comprises an amino acid sequence that comprises a vlCDR3 selected from SEQ ID NO: 24, 27, 30, 50, 51, 62, 63, 74, and 75 and wherein the variable light domain is at least 96% sequence identical to an amino acid sequence selected from SEQ ID NO: 10, 11, and 12.

[0491] In embodiments, the TSLPR binding domain is a human TSLPR binding domain that comprises a variable light domain, wherein the variable light domain comprises an amino acid sequence that comprises a vlCDR1 selected from SEQ ID NO: 22, 25, 28, 46, 47, 58, 59, 70, and 71 and wherein the variable light domain is at least 97% sequence identical to an amino acid sequence selected from SEQ ID NO: 10, 11, and 12.

[0492] In embodiments, the TSLPR binding domain is a human TSLPR binding domain that comprises a variable light domain, wherein the variable light domain comprises an amino acid sequence that comprises a vlCDR2 selected from SEQ ID NO: 23, 26, 29, 48, 49, 60, 61, 72, and 73 and wherein the variable light domain is at least 97% sequence identical to an amino acid sequence selected from SEQ ID NO: 10, 11, and 12.

[0493] In embodiments, the TSLPR binding domain is a human TSLPR binding domain that comprises a variable light domain, wherein the variable light domain comprises an amino acid sequence that comprises a vlCDR3 selected from SEQ ID NO: 24, 27, 30, 50, 51, 62, 63, 74, and 75 and wherein the variable light domain is at least 97% sequence identical to an amino acid sequence selected from SEQ ID NO: 10, 11, and 12.

[0494] In embodiments, the TSLPR binding domain is a human TSLPR binding domain that comprises a variable light domain, wherein the variable light domain comprises an amino acid sequence that comprises a vlCDR1 selected from SEQ ID NO: 22, 25, 28, 46, 47, 58, 59, 70, and 71 and wherein the variable light domain is at least 98% sequence identical to an amino acid sequence selected from SEQ ID NO: 10, 11, and 12.

[0495] In embodiments, the TSLPR binding domain is a human TSLPR binding domain that comprises a variable light domain, wherein the variable light domain comprises an amino acid sequence that comprises a vlCDR2 selected from SEQ ID NO: 23, 26, 29, 48, 49, 60, 61, 72, and 73 and wherein the variable light domain is at least 98% sequence identical to an amino acid sequence selected from SEQ ID NO: 10, 11, and 12.

[0496] In embodiments, the TSLPR binding domain is a human TSLPR binding domain that comprises a variable light domain, wherein the variable light domain comprises an amino acid sequence that comprises a vlCDR3 selected from SEQ ID NO: 24, 27, 30, 50, 51, 62, 63, 74, and 75 and wherein the variable light domain is at least 98% sequence identical to an amino acid sequence selected from SEQ ID NO: 10, 11, and 12.

[0497] In embodiments, the TSLPR binding domain is a human TSLPR binding domain that comprises a variable light domain, wherein the variable light domain comprises an amino acid sequence that comprises a vlCDR1 selected from SEQ ID NO: 22, 25, 28, 46, 47, 58, 59, 70, and 71 and a vlCDR2 selected from SEQ ID NO: 23, 26, 29, 48, 49, 60, 61, 72, and 73 and a vlCDR3 selected from SEQ ID NO: 24, 27, 30, 50, 51, 62, 63, 74, and 75, wherein the variable light domain is at least 80% sequence identical to an amino acid sequence selected from SEQ ID NO: 10, 11 and 12.

[0498] In embodiments, the TSLPR binding domain is a human TSLPR binding domain that comprises a variable light domain, wherein the variable light domain comprises an amino acid sequence that comprises a vlCDR1 selected from SEQ ID NO: 22, 25, 28, 46, 47, 58, 59, 70, and 71 and a vlCDR2 selected from SEQ ID NO: 23, 26, 29, 48, 49, 60, 61, 72, and 73 and a vlCDR3 selected from SEQ ID NO: 24, 27, 30, 50, 51, 62, 63, 74, and 75, wherein the variable light domain is at least 85% sequence identical to an amino acid sequence selected from SEQ ID NO: 10, 11 and 12.

[0499] In embodiments, the TSLPR binding domain is a human TSLPR binding domain that comprises a variable light domain, wherein the variable light domain comprises an amino acid sequence that comprises a vlCDR1 selected from SEQ ID NO: 22, 25, 28, 46, 47, 58, 59, 70, and 71 and a vlCDR2 selected from SEQ ID NO: 23, 26, 29, 48, 49, 60, 61, 72, and 73 and a vlCDR3 selected from SEQ ID NO: 24, 27, 30, 50, 51, 62, 63, 74, and 75, wherein the variable light domain is at least 90% sequence identical to an amino acid sequence selected from SEQ ID NO: 10, 11 and 12.

[0500] In embodiments, the TSLPR binding domain is a human TSLPR binding domain that comprises a variable light domain, wherein the variable light domain comprises an amino acid sequence that comprises a vlCDR1 selected from SEQ ID NO: 22, 25, 28, 46, 47, 58, 59, 70, and 71 and a vlCDR2 selected from SEQ ID NO: 23, 26, 29, 48, 49, 60, 61, 72, and 73 and a vlCDR3 selected from SEQ ID NO: 24, 27, 30, 50, 51, 62, 63, 74, and 75, wherein the variable light domain is at least 91% sequence identical to an amino acid sequence selected from SEQ ID NO: 10, 11 and 12.

[0501] In embodiments, the TSLPR binding domain is a human TSLPR binding domain that comprises a variable light domain, wherein the variable light domain comprises an amino acid sequence that comprises a vlCDR1 selected from SEQ ID NO: 22, 25, 28, 46, 47, 58, 59, 70, and 71 and a vlCDR2 selected from SEQ ID NO: 23, 26, 29, 48, 49, 60, 61, 72, and 73 and a vlCDR3 selected from SEQ ID NO: 24, 27, 30, 50, 51, 62, 63, 74, and 75, wherein the variable light domain is at least 92% sequence identical to an amino acid sequence selected from SEQ ID NO: 10, 11 and 12.

[0502] In embodiments, the TSLPR binding domain is a human TSLPR binding domain that comprises a variable light domain, wherein the variable light domain comprises an amino acid sequence that comprises a vlCDR1 selected from SEQ ID NO: 22, 25, 28, 46, 47, 58, 59, 70, and 71 and a vlCDR2 selected from SEQ ID NO: 23, 26, 29, 48, 49, 60, 61, 72, and 73 and a vlCDR3 selected from SEQ ID NO: 24, 27, 30, 50, 51, 62, 63, 74, and 75, wherein the variable light domain is at least 93% sequence identical to an amino acid sequence selected from SEQ ID NO: 10, 11 and 12.

[0503] In embodiments, the TSLPR binding domain is a human TSLPR binding domain that comprises a variable light domain, wherein the variable light domain comprises an amino acid sequence that comprises a vlCDR1 selected from SEQ ID NO: 22, 25, 28, 46, 47, 58, 59, 70, and 71 and a vlCDR2 selected from SEQ ID NO: 23, 26, 29, 48, 49, 60, 61, 72, and 73 and a vlCDR3 selected from SEQ ID NO: 24, 27, 30, 50, 51, 62, 63, 74, and 75, wherein the variable light domain is at least 94% sequence identical to an amino acid sequence selected from SEQ ID NO: 10, 11 and 12.

[0504] In embodiments, the TSLPR binding domain is a human TSLPR binding domain that comprises a variable light domain, wherein the variable light domain comprises an amino acid sequence that comprises a vlCDR1 selected from SEQ ID NO: 22, 25, 28, 46, 47, 58, 59, 70, and 71 and a vlCDR2 selected from SEQ ID NO: 23, 26, 29, 48, 49, 60, 61, 72, and 73 and a vlCDR3 selected from SEQ ID NO: 24, 27, 30, 50, 51, 62, 63, 74, and 75, wherein the variable light domain is at least 95% sequence identical to an amino acid sequence selected from SEQ ID NO: 10, 11 and 12.

[0505] In embodiments, the TSLPR binding domain is a human TSLPR binding domain that comprises a variable light domain, wherein the variable light domain comprises an amino acid sequence that comprises a vlCDR1 selected from SEQ ID NO: 22, 25, 28, 46, 47, 58, 59, 70, and 71 and a vlCDR2 selected from SEQ ID NO: 23, 26, 29, 48, 49, 60, 61, 72, and 73 and a vlCDR3 selected from SEQ ID NO: 24, 27, 30, 50, 51, 62, 63, 74, and 75, wherein the variable light domain is at least 96% sequence identical to an amino acid sequence selected from SEQ ID NO: 10, 11 and 12.

[0506] In embodiments, the antibody or antigen-binding fragment thereof of the disclosure comprises an amino acid sequence set forth in SEQ ID NO: 10, 11, 12, 148-165, or 227-229.

[0507] In embodiments, the antibody or antigen-binding fragment thereof comprises an amino acid sequence that is at least 85%, 86%, 87%, 88%, 89%, 90%, 91%, 92%, 93%, 94%, 95%, 95.5%, 96%, 96.5%, 97%, 97.5%, 98%, 98.5%, 99%, or 99.5% identical to the amino acid sequence set forth in SEQ ID NO: 10.

[0508] In embodiments, the antibody or antigen-binding fragment thereof comprises an amino acid sequence that is at least 85%, 86%, 87%, 88%, 89%, 90%, 91%, 92%, 93%, 94%, 95%, 95.5%, 96%, 96.5%, 97%, 97.5%, 98%, 98.5%, 99%, or 99.5% identical to the amino acid sequence set forth in SEQ ID NO: 11.

[0509] In embodiments, the antibody or antigen-binding fragment thereof an amino acid sequence that is at least 85%, 86%, 87%, 88%, 89%, 90%, 91%, 92%, 93%, 94%, 95%, 95.5%, 96%, 96.5%, 97%, 97.5%, 98%, 98.5%, 99%, or 99.5% identical to the amino acid sequence set forth in SEQ ID NO: 12.

[0510] In embodiments, the antibody or antigen-binding fragment thereof an amino acid sequence that is at least 85%, 86%, 87%, 88%, 89%, 90%, 91%, 92%, 93%, 94%, 95%, 95.5%, 96%, 96.5%, 97%, 97.5%, 98%, 98.5%, 99%, or 99.5% identical to the amino acid sequence set forth in SEQ ID NO: 148-165 or 227-229.

[0511] In embodiments, the TSLPR binding domain is a human TSLPR binding domain that comprises a variable light domain, wherein the variable light domain comprises an amino acid sequence that comprises a vlCDR1 selected from SEQ ID NO: 22, 25, 28, 46, 47, 58, 59, 70, and 71 and wherein the variable light domain is at least 80% sequence identical to an amino acid sequence selected from SEQ ID NO: 10, 11, and 12.

[0512] In embodiments, the TSLPR binding domain is a human TSLPR binding domain that comprises a variable light domain, wherein the variable light domain comprises an amino acid sequence that comprises a vlCDR2 selected from SEQ ID NO: 23, 26, 29, 48, 49, 60, 61, 72, and 73 and wherein the variable light domain is at least 80% sequence identical to an amino acid sequence selected from SEQ ID NO: 10, 11, and 12.

[0513] In embodiments, the TSLPR binding domain is a human TSLPR binding domain that comprises a variable light domain, wherein the variable light domain comprises an amino acid sequence that comprises a vlCDR3 selected from SEQ ID NO: 24, 27, 30, 50, 51, 62, 63, 74, and 75 and wherein the variable light domain is at least 80% sequence identical to an amino acid sequence selected from SEQ ID NO: 10, 11, and 12.

[0514] In embodiments, the TSLPR binding domain is a human TSLPR binding domain that comprises a variable light domain, wherein the variable light domain comprises an amino acid sequence that comprises a vlCDR1 selected from SEQ ID NO: 22, 25, 28, 46, 47, 58, 59, 70, and 71 and wherein the variable light domain is at least 85% sequence identical to an amino acid sequence selected from SEQ ID NO: 10, 11, and 12.

[0515] In embodiments, the TSLPR binding domain is a human TSLPR binding domain that comprises a variable light domain, wherein the variable light domain comprises an amino acid sequence that comprises a vlCDR2 selected from SEQ ID NO: 23, 26, 29, 48, 49, 60, 61, 72, and 73 and wherein the variable light domain is at least 85% sequence identical to an amino acid sequence selected from SEQ ID NO: 10, 11, and 12.

[0516] In embodiments, the TSLPR binding domain is a human TSLPR binding domain that comprises a variable light domain, wherein the variable light domain comprises an amino acid sequence that comprises a vlCDR3 selected from SEQ ID NO: 24, 27, 30, 50, 51, 62, 63, 74, and 75 and wherein the variable light domain is at least 85% sequence identical to an amino acid sequence selected from SEQ ID NO: 10, 11, and 12.

[0517] In embodiments, the TSLPR binding domain is a human TSLPR binding domain that comprises a variable light domain, wherein the variable light domain comprises an amino acid sequence that comprises a vlCDR1 selected from SEQ ID NO: 22, 25, 28, 46, 47, 58, 59, 70, and 71 and wherein the variable light domain is at least 90% sequence identical to an amino acid sequence selected from SEQ ID NO: 10, 11, and 12.

[0518] In embodiments, the TSLPR binding domain is a human TSLPR binding domain that comprises a variable light domain, wherein the variable light domain comprises an amino acid sequence that comprises a vlCDR2 selected from SEQ ID NO: 23, 26, 29, 48, 49, 60, 61, 72, and 73 and wherein the variable light domain is at least 90% sequence identical to an amino acid sequence selected from SEQ ID NO: 10, 11, and 12.

[0519] In embodiments, the TSLPR binding domain is a human TSLPR binding domain that comprises a variable light domain, wherein the variable light domain comprises an amino acid sequence that comprises a vlCDR3 selected from SEQ ID NO: 24, 27, 30, 50, 51, 62, 63, 74, and 75 and wherein the variable light domain is at least 90% sequence identical to an amino acid sequence selected from SEQ ID NO: 10, 11, and 12.

[0520] In embodiments, the TSLPR binding domain is a human TSLPR binding domain that comprises a variable light domain, wherein the variable light domain comprises an amino acid sequence that comprises a vlCDR1 selected from SEQ ID NO: 22, 25, 28, 46, 47, 58, 59, 70, and 71 and wherein the variable light domain is at least 95% sequence identical to an amino acid sequence selected from SEQ ID NO: 10, 11, and 12.

[0521] In embodiments, the TSLPR binding domain is a human TSLPR binding domain that comprises a variable light domain, wherein the variable light domain comprises an amino acid sequence that comprises a vlCDR2 selected from SEQ ID NO: 23, 26, 29, 48, 49, 60, 61, 72, and 73 and wherein the variable light domain is at least 95% sequence identical to an amino acid sequence selected from SEQ ID NO: 10, 11, and 12.

[0522] In embodiments, the TSLPR binding domain is a human TSLPR binding domain that comprises a variable light domain, wherein the variable light domain comprises an amino acid sequence that comprises a vlCDR3 selected from SEQ ID NO: 24, 27, 30, 50, 51, 62, 63, 74, and 75 and wherein the variable light domain is at least 95% sequence identical to an amino acid sequence selected from SEQ ID NO: 10, 11, and 12.

[0523] In embodiments, the TSLPR binding domain is a human TSLPR binding domain that comprises a variable light domain, wherein the variable light domain comprises an amino acid sequence that comprises a vlCDR1 selected from SEQ ID NO: 22, 25, 28, 46, 47, 58, 59, 70, and 71 and wherein the variable light domain is at least 96% sequence identical to an amino acid sequence selected from SEQ ID NO: 10, 11, and 12.

[0524] In embodiments, the TSLPR binding domain is a human TSLPR binding domain that comprises a variable light domain, wherein the variable light domain comprises an amino acid sequence that comprises a vlCDR2 selected from SEQ ID NO: 23, 26, 29, 48, 49, 60, 61, 72, and 73 and wherein the variable light domain is at least 96% sequence identical to an amino acid sequence selected from SEQ ID NO: 10, 11, and 12.

[0525] In embodiments, the TSLPR binding domain is a human TSLPR binding domain that comprises a variable light domain, wherein the variable light domain comprises an amino acid sequence that comprises a vlCDR3 selected from SEQ ID NO: 24, 27, 30, 50, 51, 62, 63, 74, and 75 and wherein the variable light domain is at least 96% sequence identical to an amino acid sequence selected from SEQ ID NO: 10, 11, and 12.

[0526] In embodiments, the TSLPR binding domain is a human TSLPR binding domain that comprises a variable light domain, wherein the variable light domain comprises an amino acid sequence that comprises a vlCDR1 selected from SEQ ID NO: 22, 25, 28, 46, 47, 58, 59, 70, and 71 and wherein the variable light domain is at least 97% sequence identical to an amino acid sequence selected from SEQ ID NO: 10, 11, and 12.

[0527] In embodiments, the TSLPR binding domain is a human TSLPR binding domain that comprises a variable light domain, wherein the variable light domain comprises an amino acid sequence that comprises a vlCDR2 selected from SEQ ID NO: 23, 26, 29, 48, 49, 60, 61, 72, and 73 and wherein the variable light domain is at least 97% sequence identical to an amino acid sequence selected from SEQ ID NO: 10, 11, and 12.

[0528] In embodiments, the TSLPR binding domain is a human TSLPR binding domain that comprises a variable light domain, wherein the variable light domain comprises an amino acid sequence that comprises a vlCDR3 selected from SEQ ID NO: 24, 27, 30, 50, 51, 62, 63, 74, and 75 and wherein the variable light domain is at least 97% sequence identical to an amino acid sequence selected from SEQ ID NO: 10, 11, and 12.

[0529] In embodiments, the TSLPR binding domain is a human TSLPR binding domain that comprises a variable light domain, wherein the variable light domain comprises an amino acid sequence that comprises a vlCDR1 selected from SEQ ID NO: 22, 25, 28, 46, 47, 58, 59, 70, and 71 and wherein the variable light domain is at least 98% sequence identical to an amino acid sequence selected from SEQ ID NO: 10, 11, and 12.

[0530] In embodiments, the TSLPR binding domain is a human TSLPR binding domain that comprises a variable light domain, wherein the variable light domain comprises an amino acid sequence that comprises a vlCDR2 selected from SEQ ID NO: 23, 26, 29, 48, 49, 60, 61, 72, and 73 and wherein the variable light domain is at least 98% sequence identical to an amino acid sequence selected from SEQ ID NO: 10, 11, and 12.

[0531] In embodiments, the TSLPR binding domain is a human TSLPR binding domain that comprises a variable light domain, wherein the variable light domain comprises an amino acid sequence that comprises a vlCDR3 selected from SEQ ID NO: 24, 27, 30, 50, 51, 62, 63, 74, and 75 and wherein the variable light domain is at least 98% sequence identical to an amino acid sequence selected from SEQ ID NO: 10, 11, and 12.

[0532] Variations of 1, 2 or 3 amino acid residues from the recited CDR sequences are allowed while retaining the same kind of binding activity (in kind, not necessarily in amount). Hence, the light chain CDR 1, 2 and 3 sequences preferably contain sequences that deviate in no more than three, preferably no more than two, more preferably no more than one amino acid from the recited CDR sequences. In certain aspects, the light chain CDR 1, 2 and 3 sequences are identical to the recited CDR sequences.

[0533] In embodiments, the variable light domain of the antibody or antigen-binding fragment thereof that binds human TSLPR can have from 0 to 10, preferably from 0 to 5 amino acid insertions, deletions, substitutions, additions in the sequence of the variable light domain outside of the three CDR sequences, or a combination thereof. In embodiments, the variable light domain comprises from 0 to 9, from 0 to 8, from 0 to 7, from 0 to 6, from 0 to 5, from 0 to 4, preferably from 0 to 3, preferably from 0 to 2, preferably from 0 to 1 and preferably 0 amino acid insertions, deletions, substitutions, additions with respect to the indicated amino acid sequence, or a combination thereof.

[0534] In certain aspects, the TSLPR binding domain is a human TSLPR binding domain that comprises a variable light domain, wherein the VL region comprises an amino acid sequence that is at least 90%, 95%, 95.5%, 96%, 96.5%, 97%, 97.5%, 98%, 98.5%, 99%, 99.5% or 100% to the amino acid sequence of the VL region set forth in SEQ ID NO: 10, 11, and 12.

[0535] In certain aspects, the TSLPR binding domain is a human TSLPR binding domain that comprises a variable light domain, wherein the variable light domain comprises:
[0536] (i) a vlCDR1 comprising the amino acid sequence SEQ ID NO: 22, a vlCDR2 comprising the amino acid sequence SEQ ID NO: 23, and a vlCDR3 comprising the amino acid sequence SEQ ID NO: 24;
[0537] (ii) a vlCDR1 comprising the amino acid sequence SEQ ID NO: 25, a vlCDR2 comprising the amino acid sequence SEQ ID NO: 26, and a vlCDR3 comprising the amino acid sequence SEQ ID NO: 27; or
[0538] (iii) a vlCDR1 comprises the amino acid sequence SEQ ID NO: 28, a vlCDR2 comprising the amino acid sequence SEQ ID NO: 29, and a vlCDR3 comprising the amino acid sequence SEQ ID NO: 30.

[0539] In certain aspects, the TSLPR binding domain is a human TSLPR binding domain that comprises a variable light domain, wherein the variable light domain comprises:
[0540] (i) a vlCDR1 comprising the amino acid sequence SEQ ID NO: 46, a vlCDR2 comprising the amino acid sequence SEQ ID NO: 48, and a vlCDR3 comprising the amino acid sequence SEQ ID NO: 50;
[0541] (ii) a vlCDR1 comprising the amino acid sequence SEQ ID NO: 70, a vlCDR2 comprising the amino acid sequence SEQ ID NO: 72, and a vlCDR3 comprising the amino acid sequence SEQ ID NO: 74; or
[0542] (iii) a vlCDR1 comprises the amino acid sequence SEQ ID NO: 58, a vlCDR2 comprising the amino acid sequence SEQ ID NO: 60, and a vlCDR3 comprising the amino acid sequence SEQ ID NO: 62.

[0543] In certain aspects, the TSLPR binding domain is a human TSLPR binding domain that comprises a variable light domain, wherein the variable light domain comprises:
[0544] (i) a vlCDR1 comprising the amino acid sequence SEQ ID NO: 47, a vlCDR2 comprising the amino acid sequence SEQ ID NO: 49, and a vlCDR3 comprising the amino acid sequence SEQ ID NO: 51;
[0545] (ii) a vlCDR1 comprising the amino acid sequence SEQ ID NO: 71, a vlCDR2 comprising the amino acid sequence SEQ ID NO: 73, and a vlCDR3 comprising the amino acid sequence SEQ ID NO: 75; or
[0546] (iii) a vlCDR1 comprises the amino acid sequence SEQ ID NO: 59, a vlCDR2 comprising the amino acid sequence SEQ ID NO: 61, and a vlCDR3 comprising the amino acid sequence SEQ ID NO: 63.

[0547] In embodiments, the variable light chain of one or both VL binding regions of the anti-TSLPR antibody or antigen-binding fragment thereof can have from 0 to 10, preferably from 0 to 5 amino acid insertions, deletions, substitutions, additions or a combination thereof with respect to SEQ ID NO: 10, 11, 12. In embodiments, the variable light domain of one or both VH/VL binding regions of the anti-TSLPR antibody or antigen-binding fragment thereof comprises from 0 to 9, from 0 to 8, from 0 to 7, from 0 to 6, from 0 to 5, from 0 to 4, preferably from 0 to 3, preferably from 0 to 2, preferably from 0 to 1 and preferably 0 amino acid insertions, deletions, substitutions, additions with respect to the indicated amino acid sequence, or a combination thereof.

[0548] In some embodiments, the variable light domain is encoded by a polynucleotide comprising SEQ ID NO: 37, 38, or 39.

### 3. Variable Heavy Domain/Variable Light Domain Combinations

### B. Constant Regions

[0549] As will be appreciated by those in the art, the antigen binding domains of the invention that bind to human TSLPR and human CD3e are fused to antibody constant regions in a variety of ways, depending on the format used. That is, in some cases, traditional bivalent, monospecific antibodies can be made against TSLPR. In other formats, as described below, the ABDs are linked with heterodimerization Fc domains, that can include a number of additional variants (as compared to human IgG1, IgG2 or IgG4), depending on use and format.

[0550] In embodiments, the antibodies disclosed herein comprise an IgG1 constant region comprising CH1, hinger, CH2, and CH3. In embodiments, the IgG1 constant region comprises the amino acid sequence of SEQ ID NO: 225.

(SEQ ID NO: 225)
IgG1 (bold letter indicates S239 and I332):
ASTKGPSVFPLAPSSKSTSGGTAALGCLVKDYFPEPVTVSWNSGALTS
GVHTFPAVLQSSGLYSLSSVVTVPSSSLGTQTYICNVNHKPSNTKVDKKV
EPKSCDKTHTCPPCPAPELLGGPSVFLFPPKPKDTLMISRTPEVTCVVVD
VSHEDPEVKFNWYVDGVEVHNAKTKPREEQYNSTYRVVSVLTVLHQDWLN
GKEYKCKVSNKALPAPIEKTISKAKGQPREPQVYTLPPSREEMTKNQVSL
TCLVKGFYPSDIAVEWESNGQPENNYKTTPPVLDSDGSFFLYSKLTVDKS
RWQQGNVFSCSVMHEALHNHYTQKSLSLSPGK.

[0551] In embodiments, the antibodies disclosed herein comprise the IgG1 constant region of SEQ ID NO: 225 and comprise the VH and VL of SEQ ID NO: 9 and 12 [Clone 1A9], the VH and VL of SEQ ID NO: 7 and 10 [Clone 1B7], the VH and VL of SEQ ID NO: 8 and 11 [Clone 1C3], the VH and VL of SEQ ID NO: 76 and 148 [Clone 2E4], the VH and VL of SEQ ID NO: 77 and 149 [Clone 2H8], the VH and VL of SEQ ID NO: 78 and 150 [Clone 3E5], the VH and VL of SEQ ID NO: 79 and 151 [Clone 1A10], the VH and VL of SEQ ID NO: 80 and 152 [Clone 1B9], the VH and VL of SEQ ID NO: 81 and 153 [Clone 1D10], the VH and VL of SEQ ID NO: 82 and 154 [Clone 1F6], the VH and VL of SEQ ID NO: 83 and 155 [Clone 1G3], the VH and VL of SEQ ID NO: 84 and 156 [Clone 3D8], the VH and VL of SEQ ID NO: 85 and 157 [Clone 10C4], the VH and VL of SEQ ID NO: 86 and 158 [Clone 2A4], the VH and VL of SEQ ID NO: 87 and 159 [Clone 2B2], the VH and VL of SEQ ID NO: 88 and 160 [Clone 2D11], the VH and VL of SEQ ID NO: 89 and 161 [Clone 2E6], the VH and VL of SEQ ID NO: 90 and 162 [Clone 2F1], the VH and VL of SEQ ID NO: 91 and 163 [Clone 2F5], the VH and VL of SEQ ID NO: 92 and 164 [Clone 2H1], or the VH and VL of SEQ ID NO: 93 and 165 [Clone 2H4].

[0552] In embodiments, the antibodies disclosed herein comprise the IgG1 constant region of SEQ ID NO: 225 and comprise the VH and VL of SEQ ID NO: 9 and 12 [Clone 1A9], the VH and VL of SEQ ID NO: 7 and 10 [Clone 1B7], the VH and VL of SEQ ID NO: 8 and 11 [Clone 1C3], the VH and VL of SEQ ID NO: 76 and 148 [Clone 2E4], the VH and VL of SEQ ID NO: 77 and 149 [Clone 2H8], the VH and VL of SEQ ID NO: 78 and 150 [Clone 3E5], the VH and VL of SEQ ID NO: 79 and 151 [Clone 1A10], the VH and VL of SEQ ID NO: 80 and 152 [Clone 1B9], the VH and VL of SEQ ID NO: 81 and 153 [Clone 1D10], the VH and VL of SEQ ID NO: 82 and 154 [Clone 1F6], the VH and VL of SEQ ID NO: 83 and 155 [Clone 1G3], the VH and VL of SEQ ID NO: 84 and 156 [Clone 3D8], the VH and VL of SEQ ID NO: 85 and 157 [Clone 10C4], the VH and VL of SEQ ID NO: 86 and 158 [Clone 2A4], the VH and VL of SEQ ID NO: 87 and 159 [Clone 2B2], the VH and VL of SEQ ID NO: 88 and 160 [Clone 2D11], the VH and VL of SEQ ID NO: 89 and 161 [Clone 2E6], the VH and VL of SEQ ID NO: 90 and 162 [Clone 2F1], the VH and VL of SEQ ID NO: 91 and 163 [Clone 2F5], the VH and VL of SEQ ID NO: 92 and 164 [Clone 2H1], or the VH and VL of SEQ ID NO: 93 and 165 [Clone 2H4].

[0553] In embodiments, the antibodies disclosed herein comprise an Fc-modified IgG1 constant region comprising CH1, CH2, and CH3 with a S239D/1332E mutation. In embodiments, the IgG1 constant region comprises the amino acid sequence of SEQ ID NO: 226.

Fc-modified IgG1 (bold letters indicate
S239D/I332E):
(SEQ ID NO: 226)
ASTKGPSVFPLAPSSKSTSGGTAALGCLVKDYFPEPVTVSWNSGALTS
GVHTFPAVLQSSGLYSLSSVVTVPSSSLGTQTYICNVNHKPSNTKVDKKV
EPKSCDKTHTCPPCPAPELLGGPDVFLFPPKPKDTLMISRTPEVTCVVVD
VSHEDPEVKFNWYVDGVEVHNAKTKPREEQYNSTYRVVSVLTVLHQDWLN
GKEYKCKVSNKALPAPEEKTISKAKGQPREPQVYTLPPSREEMTKNQVSL
TCLVKGFYPSDIAVEWESNGQPENNYKTTPPVLDSDGSFFLYSKLTVDKS
RWQQGNVFSCSVMHEALHNHYTQKSLSLSPGK.

[0554] In embodiments the antibodies disclosed herein comprise the IgG1 constant region of SEQ ID NO: 226 and comprise the VH and VL of SEQ ID NO: 9 and 12 [Clone 1A9], the VH and VL of SEQ ID NO: 7 and 10 [Clone 1B7], the VH and VL of SEQ ID NO: 8 and 11 [Clone 1C3], the VH and VL of SEQ ID NO: 76 and 148 [Clone 2E4], the VH and VL of SEQ ID NO: 77 and 149 [Clone 2H8], the VH and VL of SEQ ID NO: 78 and 150 [Clone 3E5], the VH and VL of SEQ ID NO: 79 and 151 [Clone 1A10], the VH and VL of SEQ ID NO: 80 and 152 [Clone 1B9], the VH and VL of SEQ ID NO: 81 and 153 [Clone 1D10], the VH and VL of SEQ ID NO: 82 and 154 [Clone 1F6], the VH and VL of SEQ ID NO: 83 and 155 [Clone 1G3], the VH and VL of SEQ ID NO: 84 and 156 [Clone 3D8], the VH and VL of SEQ ID NO: 85 and 157 [Clone 10C4], the VH and VL of SEQ ID NO: 86 and 158 [Clone 2A4], the VH and VL of SEQ ID NO: 87 and 159 [Clone 2B2], the VH and VL of SEQ ID NO: 88 and 160 [Clone 2D11], the VH and VL of SEQ ID NO: 89 and 161 [Clone 2E6], the VH and VL of SEQ ID NO: 90 and 162 [Clone 2F1], the VH and VL of SEQ ID NO: 91 and 163 [Clone 2F5], the VH and VL of SEQ ID NO: 92 and 164 [Clone 2H1], or the VH and VL of SEQ ID NO: 93 and 165 [Clone 2H4].

### C. Further Structural Aspects of the Antibodies or Antigen-Binding Fragments Thereof

[0555] In further aspects, the anti-TSLPR antibody or antigen-binding fragment thereof comprises the heavy chain variable regions and light chain variable regions described above that bind TSLPR. Additional aspects of the constant regions of such binding proteins or antibodies, and methods of making them, are described below.

[0556] In one aspect, an antibody or antigen-binding fragment thereof of the disclosure exhibits ADCC activity. In such aspect, the antibody or antigen-binding fragment thereof can have improved ADCC activity. One technique for enhancing ADCC of an antibody is afucosylation. (See for instance Junttila, T. T., K. Parsons, et al. (2010). “Superior In vivo Efficacy of Afucosylated Trastuzumab in the Treatment of HER2-Amplified Breast Cancer” Cancer Research 70 (11): 4481-4489). In some aspects, the antibody or antigen-binding fragment thereof according to the disclosure is afucosylated. Alternatively, or additionally, the antibody or antigen-binding fragment thereof according to the disclosure is glycoengineered and/or mutated to improve Fc binding to low affinity activating FcγRIIIa, and/or to reduce binding to the low affinity inhibitory FcγRIIb. In some aspects, the antibody or antigen-binding fragment thereof of the disclosure is afucosylated in order to enhance ADCC activity. In some aspects, the antibody or antigen-binding fragment thereof of the disclosure comprises a reduced amount of fucosylation of the N-linked carbohydrate structure in the Fc region, when compared to the same antibody produced in a mammalian cell.

[0557] In some embodiments, the anti-TSLPR antibodies or antigen binding fragments thereof comprises at least one TSLPR binding domain. In some aspects, the antibodies or antigen-binding fragments thereof comprise two TSLPR binding domains that comprise the same amino acid sequence. In some aspects, the antibodies or antigen-binding fragments thereof comprise two TSLPR binding domain that comprise different amino acid sequences.

[0558] In some aspects, the two VH/VL domains of the anti-TSLPR antibodies or antigen-binding fragments thereof comprise two heavy chain variable regions that bind human TSLPR, wherein the two VH regions comprise amino acid sequences that are at least 90%, 95%, 95.5%, 96%, 96.5%, 97%, 97.5%, 98%, 98.5%, 99%, 99.5% or 100% identical to the amino acid sequence of the VH region set forth in SEQ ID NO: 7, 8, 9, or 76-93 and two light chain variable regions that bind human TSLPR, wherein the two VL regions comprise amino acid sequences that are at least 90%, 95%, 95.5%, 96%, 96.5%, 97%, 97.5%, 98%, 98.5%, 99%, 99.5% or 100% to the amino acid sequence of the VL region set forth in SEQ ID NO: 10, 11, 12, 148-165, or 227-229.

[0559] In some aspects, the two VH/VL domains of the anti-TSLPR antibodies or antigen-binding fragments thereof comprise two heavy chain variable regions that bind human TSLPR, wherein one VH region comprises an amino acid sequence that is at least 90%, 95%, 95.5%, 96%, 96.5%, 97%, 97.5%, 98%, 98.5%, 99%, 99.5% or 100% identical to the amino acid sequence of the VH region set forth in SEQ ID NO: 7 and one VH region comprises an amino acid sequence that is at least 90%, 95%, 95.5%, 96%, 96.5%, 97%, 97.5%, 98%, 98.5%, 99%, 99.5% or 100% identical to the amino acid sequence of the VH region set forth in SEQ ID NO: 8.

[0560] In some aspects, the two VH/VL domains of the anti-TSLPR antibodies or antigen-binding fragments thereof comprise two heavy chain variable regions that bind human TSLPR, wherein one VH region comprises an amino acid sequence that is at least 90%, 95%, 95.5%, 96%, 96.5%, 97%, 97.5%, 98%, 98.5%, 99%, 99.5% or 100% identical to the amino acid sequence of the VH region set forth in SEQ ID NO: 7 and one VH region comprises an amino acid sequence that is at least 90%, 95%, 95.5%, 96%, 96.5%, 97%, 97.5%, 98%, 98.5%, 99%, 99.5% or 100% identical to the amino acid sequence of the VH region set forth in SEQ ID NO: 9.

[0561] In some aspects, the two VH/VL domains of the anti-TSLPR antibodies or antigen-binding fragments thereof comprise two heavy chain variable regions that bind human TSLPR, wherein one VH region comprises an amino acid sequence that is at least 90%, 95%, 95.5%, 96%, 96.5%, 97%, 97.5%, 98%, 98.5%, 99%, 99.5% or 100% identical to the amino acid sequence of the VH region set forth in SEQ ID NO: 8 and one VH region comprises an amino acid sequence that is at least 90%, 95%, 95.5%, 96%, 96.5%, 97%, 97.5%, 98%, 98.5%, 99%, 99.5% or 100% identical to the amino acid sequence of the VH region set forth in SEQ ID NO: 9.

[0562] In some aspects, the two VH/VL domains of the anti-TSLPR antibodies or antigen-binding fragments thereof comprise two light chain variable regions that bind human TSLPR, wherein one VL region comprises an amino acid sequence that is at least 90%, 95%, 95.5%, 96%, 96.5%, 97%, 97.5%, 98%, 98.5%, 99%, 99.5% or 100% identical to the amino acid sequence of the VL region set forth in SEQ ID NO: 10 and one VL region comprises an amino acid sequence that is at least 90%, 95%, 95.5%, 96%, 96.5%, 97%, 97.5%, 98%, 98.5%, 99%, 99.5% or 100% identical to the amino acid sequence of the VL region set forth in SEQ ID NO: 11.

[0563] In some aspects, the two VH/VL domains of the anti-TSLPR antibodies or antigen-binding fragments thereof comprise two light chain variable regions that bind human TSLPR, wherein one VL region comprises an amino acid sequence that is at least 90%, 95%, 95.5%, 96%, 96.5%, 97%, 97.5%, 98%, 98.5%, 99%, 99.5% or 100% identical to the amino acid sequence of the VL region set forth in SEQ ID NO: 10 and one VL region comprises an amino acid sequence that is at least 90%, 95%, 95.5%, 96%, 96.5%, 97%, 97.5%, 98%, 98.5%, 99%, 99.5% or 100% identical to the amino acid sequence of the VL region set forth in SEQ ID NO: 12.

[0564] In some aspects, the two VH/VL domains of the anti-TSLPR antibodies or antigen-binding fragments thereof comprise two light chain variable regions that bind human TSLPR, wherein one VL region comprises an amino acid sequence that is at least 90%, 95%, 95.5%, 96%, 96.5%, 97%, 97.5%, 98%, 98.5%, 99%, 99.5% or 100% identical to the amino acid sequence of the VL region set forth in SEQ ID NO: 11 and one VL region comprises an amino acid sequence that is at least 90%, 95%, 95.5%, 96%, 96.5%, 97%, 97.5%, 98%, 98.5%, 99%, 99.5% or 100% identical to the amino acid sequence of the VL region set forth in SEQ ID NO: 12.

[0565] In some aspects, the two VH/VL domains of the anti-TSLPR antibodies or antigen-binding fragments thereof comprise two heavy chain variable regions that bind human TSLPR, wherein one VH region comprises an amino acid sequence that is at least 90%, 95%, 95.5%, 96%, 96.5%, 97%, 97.5%, 98%, 98.5%, 99%, 99.5% or 100% identical to the amino acid sequence of the VH region set forth in SEQ ID NO: 7 and one VH region comprises an amino acid sequence that is at least 90%, 95%, 95.5%, 96%, 96.5%, 97%, 97.5%, 98%, 98.5%, 99%, 99.5% or 100% identical to the amino acid sequence of the VH region set forth in SEQ ID NO: 8 or 9; and two light chain variable regions that bind human TSLPR, wherein one VL region comprises an amino acid sequence that is at least 90%, 95%, 95.5%, 96%, 96.5%, 97%, 97.5%, 98%, 98.5%, 99%, 99.5% or 100% identical to the amino acid sequence of the VL region set forth in SEQ ID NO: 10 and one VL region comprises an amino acid sequence that is at least 90%, 95%, 95.5%, 96%, 96.5%, 97%, 97.5%, 98%, 98.5%, 99%, 99.5% or 100% identical to the amino acid sequence of the VL region set forth in SEQ ID NO: 11 or 12.

[0566] In some aspects, the two VH/VL domains of the anti-TSLPR antibodies or antigen-binding fragments thereof comprise two heavy chain variable regions that bind human TSLPR, wherein both VH regions comprises an amino acid sequence that is at least 90%, 95%, 95.5%, 96%, 96.5%, 97%, 97.5%, 98%, 98.5%, 99%, 99.5% or 100% identical to the amino acid sequence of the VH region set forth in SEQ ID NO: 7; and two light chain variable regions that bind human TSLPR, wherein both VL regions comprise an amino acid sequence that is at least 90%, 95%, 95.5%, 96%, 96.5%, 97%, 97.5%, 98%, 98.5%, 99%, 99.5% or 100% identical to the amino acid sequence of the VL region set forth in SEQ ID NO: 11.

[0567] In some aspects, the two VH/VL domains of the anti-TSLPR antibodies or antigen-binding fragments thereof comprise two heavy chain variable regions that bind human TSLPR, wherein both VH regions comprises an amino acid sequence that is at least 90%, 95%, 95.5%, 96%, 96.5%, 97%, 97.5%, 98%, 98.5%, 99%, 99.5% or 100% identical to the amino acid sequence of the VH region set forth in SEQ ID NO: 7; and two light chain variable regions that bind human TSLPR, wherein both VL regions comprise an amino acid sequence that is at least 90%, 95%, 95.5%, 96%, 96.5%, 97%, 97.5%, 98%, 98.5%, 99%, 99.5% or 100% identical to the amino acid sequence of the VL region set forth in SEQ ID NO: 12.

[0568] In some aspects, the two VH/VL domains of the anti-TSLPR antibodies or antigen-binding fragments thereof comprise two heavy chain variable regions that bind human TSLPR, wherein both VH regions comprises an amino acid sequence that is at least 90%, 95%, 95.5%, 96%, 96.5%, 97%, 97.5%, 98%, 98.5%, 99%, 99.5% or 100% identical to the amino acid sequence of the VH region set forth in SEQ ID NO: 8; and two light chain variable regions that bind human TSLPR, wherein both VL regions comprise an amino acid sequence that is at least 90%, 95%, 95.5%, 96%, 96.5%, 97%, 97.5%, 98%, 98.5%, 99%, 99.5% or 100% identical to the amino acid sequence of the VL region set forth in SEQ ID NO: 10.

[0569] In some aspects, the two VH/VL domains of the anti-TSLPR antibodies or antigen-binding fragments thereof comprise two heavy chain variable regions that bind human TSLPR, wherein both VH regions comprises an amino acid sequence that is at least 90%, 95%, 95.5%, 96%, 96.5%, 97%, 97.5%, 98%, 98.5%, 99%, 99.5% or 100% identical to the amino acid sequence of the VH region set forth in SEQ ID NO: 8; and two light chain variable regions that bind human TSLPR, wherein both VL regions comprise an amino acid sequence that is at least 90%, 95%, 95.5%, 96%, 96.5%, 97%, 97.5%, 98%, 98.5%, 99%, 99.5% or 100% identical to the amino acid sequence of the VL region set forth in SEQ ID NO: 12.

[0570] In some aspects, the two VH/VL domains of the anti-TSLPR antibodies or antigen-binding fragments thereof comprise two heavy chain variable regions that bind human TSLPR, wherein both VH regions comprises an amino acid sequence that is at least 90%, 95%, 95.5%, 96%, 96.5%, 97%, 97.5%, 98%, 98.5%, 99%, 99.5% or 100% identical to the amino acid sequence of the VH region set forth in SEQ ID NO: 9; and two light chain variable regions that bind human TSLPR, wherein both VL regions comprise an amino acid sequence that is at least 90%, 95%, 95.5%, 96%, 96.5%, 97%, 97.5%, 98%, 98.5%, 99%, 99.5% or 100% identical to the amino acid sequence of the VL region set forth in SEQ ID NO: 10.

[0571] In some aspects, the two VH/VL domains of the anti-TSLPR antibodies or antigen-binding fragments thereof comprise two heavy chain variable regions that bind human TSLPR, wherein both VH regions comprises an amino acid sequence that is at least 90%, 95%, 95.5%, 96%, 96.5%, 97%, 97.5%, 98%, 98.5%, 99%, 99.5% or 100% identical to the amino acid sequence of the VH region set forth in SEQ ID NO: 9; and two light chain variable regions that bind human TSLPR, wherein both VL regions comprise an amino acid sequence that is at least 90%, 95%, 95.5%, 96%, 96.5%, 97%, 97.5%, 98%, 98.5%, 99%, 99.5% or 100% identical to the amino acid sequence of the VL region set forth in SEQ ID NO: 11.

[0572] In some aspects, the two VH/VL domains of the anti-TSLPR antibodies or antigen-binding fragments thereof comprise two heavy chain variable regions that bind human TSLPR, wherein one VH region comprises an amino acid sequence that is at least 90%, 95%, 95.5%, 96%, 96.5%, 97%, 97.5%, 98%, 98.5%, 99%, 99.5% or 100% identical to the amino acid sequence of the VH region set forth in SEQ ID NO: 7; and one heavy chain variable region comprises an amino acid sequence that is at least 90%, 95%, 95.5%, 96%, 96.5%, 97%, 97.5%, 98%, 98.5%, 99%, 99.5% or 100% identical to the amino acid sequence of the VH region set forth in SEQ ID NO: 8; and two light chain variable regions that bind human TSLPR, wherein both VL regions comprise an amino acid sequence that is at least 90%, 95%, 95.5%, 96%, 96.5%, 97%, 97.5%, 98%, 98.5%, 99%, 99.5% or 100% identical to the amino acid sequence of the VL region set forth in SEQ ID NO: 10.

[0573] In some aspects, the two VH/VL domains of the anti-TSLPR antibodies or antigen-binding fragments thereof comprise two heavy chain variable regions that bind human TSLPR, wherein one VH region comprises an amino acid sequence that is at least 90%, 95%, 95.5%, 96%, 96.5%, 97%, 97.5%, 98%, 98.5%, 99%, 99.5% or 100% identical to the amino acid sequence of the VH region set forth in SEQ ID NO: 7; and one heavy chain variable region comprises an amino acid sequence that is at least 90%, 95%, 95.5%, 96%, 96.5%, 97%, 97.5%, 98%, 98.5%, 99%, 99.5% or 100% identical to the amino acid sequence of the VH region set forth in SEQ ID NO: 8; and two light chain variable regions that bind human TSLPR, wherein both VL regions comprise an amino acid sequence that is at least 90%, 95%, 95.5%, 96%, 96.5%, 97%, 97.5%, 98%, 98.5%, 99%, 99.5% or 100% identical to the amino acid sequence of the VL region set forth in SEQ ID NO: 11.

[0574] In some aspects, the two VH/VL domains of the anti-TSLPR antibodies or antigen-binding fragments thereof comprise two heavy chain variable regions that bind human TSLPR, wherein one VH region comprises an amino acid sequence that is at least 90%, 95%, 95.5%, 96%, 96.5%, 97%, 97.5%, 98%, 98.5%, 99%, 99.5% or 100% identical to the amino acid sequence of the VH region set forth in SEQ ID NO: 7; and one heavy chain variable region comprises an amino acid sequence that is at least 90%, 95%, 95.5%, 96%, 96.5%, 97%, 97.5%, 98%, 98.5%, 99%, 99.5% or 100% identical to the amino acid sequence of the VH region set forth in SEQ ID NO: 8; and two light chain variable regions that bind human TSLPR, wherein both VL regions comprise an amino acid sequence that is at least 90%, 95%, 95.5%, 96%, 96.5%, 97%, 97.5%, 98%, 98.5%, 99%, 99.5% or 100% identical to the amino acid sequence of the VL region set forth in SEQ ID NO: 12.

[0575] In some aspects, the two VH/VL domains of the anti-TSLPR antibodies or antigen-binding fragments thereof comprise two heavy chain variable regions that bind human TSLPR, wherein one VH region comprises an amino acid sequence that is at least 90%, 95%, 95.5%, 96%, 96.5%, 97%, 97.5%, 98%, 98.5%, 99%, 99.5% or 100% identical to the amino acid sequence of the VH region set forth in SEQ ID NO: 7; and one heavy chain variable region comprises an amino acid sequence that is at least 90%, 95%, 95.5%, 96%, 96.5%, 97%, 97.5%, 98%, 98.5%, 99%, 99.5% or 100% identical to the amino acid sequence of the VH region set forth in SEQ ID NO: 9; and two light chain variable regions that bind human TSLPR, wherein both VL regions comprise an amino acid sequence that is at least 90%, 95%, 95.5%, 96%, 96.5%, 97%, 97.5%, 98%, 98.5%, 99%, 99.5% or 100% identical to the amino acid sequence of the VL region set forth in SEQ ID NO: 10.

[0576] In some aspects, the two VH/VL domains of the anti-TSLPR antibodies or antigen-binding fragments thereof comprise two heavy chain variable regions that bind human TSLPR, wherein one VH region comprises an amino acid sequence that is at least 90%, 95%, 95.5%, 96%, 96.5%, 97%, 97.5%, 98%, 98.5%, 99%, 99.5% or 100% identical to the amino acid sequence of the VH region set forth in SEQ ID NO: 7; and one heavy chain variable region comprises an amino acid sequence that is at least 90%, 95%, 95.5%, 96%, 96.5%, 97%, 97.5%, 98%, 98.5%, 99%, 99.5% or 100% identical to the amino acid sequence of the VH region set forth in SEQ ID NO: 9; and two light chain variable regions that bind human TSLPR, wherein both VL regions comprise an amino acid sequence that is at least 90%, 95%, 95.5%, 96%, 96.5%, 97%, 97.5%, 98%, 98.5%, 99%, 99.5% or 100% identical to the amino acid sequence of the VL region set forth in SEQ ID NO: 11.

[0577] In some aspects, the two VH/VL domains of the anti-TSLPR antibodies or antigen-binding fragments thereof comprise two heavy chain variable regions that bind human TSLPR, wherein one VH region comprises an amino acid sequence that is at least 90%, 95%, 95.5%, 96%, 96.5%, 97%, 97.5%, 98%, 98.5%, 99%, 99.5% or 100% identical to the amino acid sequence of the VH region set forth in SEQ ID NO: 7; and one heavy chain variable region comprises an amino acid sequence that is at least 90%, 95%, 95.5%, 96%, 96.5%, 97%, 97.5%, 98%, 98.5%, 99%, 99.5% or 100% identical to the amino acid sequence of the VH region set forth in SEQ ID NO: 9; and two light chain variable regions that bind human TSLPR, wherein both VL regions comprise an amino acid sequence that is at least 90%, 95%, 95.5%, 96%, 96.5%, 97%, 97.5%, 98%, 98.5%, 99%, 99.5% or 100% identical to the amino acid sequence of the VL region set forth in SEQ ID NO: 12.

[0578] In some aspects, the two VH/VL domains of the anti-TSLPR antibodies or antigen-binding fragments thereof comprise two heavy chain variable regions that bind human TSLPR, wherein one VH region comprises an amino acid sequence that is at least 90%, 95%, 95.5%, 96%, 96.5%, 97%, 97.5%, 98%, 98.5%, 99%, 99.5% or 100% identical to the amino acid sequence of the VH region set forth in SEQ ID NO: 8; and one heavy chain variable region comprises an amino acid sequence that is at least 90%, 95%, 95.5%, 96%, 96.5%, 97%, 97.5%, 98%, 98.5%, 99%, 99.5% or 100% identical to the amino acid sequence of the VH region set forth in SEQ ID NO: 9; and two light chain variable regions that bind human TSLPR, wherein both VL regions comprise an amino acid sequence that is at least 90%, 95%, 95.5%, 96%, 96.5%, 97%, 97.5%, 98%, 98.5%, 99%, 99.5% or 100% identical to the amino acid sequence of the VL region set forth in SEQ ID NO: 10.

[0579] In some aspects, the two VH/VL domains of the anti-TSLPR antibodies or antigen-binding fragments thereof comprise two heavy chain variable regions that bind human TSLPR, wherein one VH region comprises an amino acid sequence that is at least 90%, 95%, 95.5%, 96%, 96.5%, 97%, 97.5%, 98%, 98.5%, 99%, 99.5% or 100% identical to the amino acid sequence of the VH region set forth in SEQ ID NO: 8; and one heavy chain variable region comprises an amino acid sequence that is at least 90%, 95%, 95.5%, 96%, 96.5%, 97%, 97.5%, 98%, 98.5%, 99%, 99.5% or 100% identical to the amino acid sequence of the VH region set forth in SEQ ID NO: 9; and two light chain variable regions that bind human TSLPR, wherein both VL regions comprise an amino acid sequence that is at least 90%, 95%, 95.5%, 96%, 96.5%, 97%, 97.5%, 98%, 98.5%, 99%, 99.5% or 100% identical to the amino acid sequence of the VL region set forth in SEQ ID NO: 11.

[0580] In some aspects, the two VH/VL domains of the anti-TSLPR antibodies or antigen-binding fragments thereof comprise two heavy chain variable regions that bind human TSLPR, wherein one VH region comprises an amino acid sequence that is at least 90%, 95%, 95.5%, 96%, 96.5%, 97%, 97.5%, 98%, 98.5%, 99%, 99.5% or 100% identical to the amino acid sequence of the VH region set forth in SEQ ID NO: 8; and one heavy chain variable region comprises an amino acid sequence that is at least 90%, 95%, 95.5%, 96%, 96.5%, 97%, 97.5%, 98%, 98.5%, 99%, 99.5% or 100% identical to the amino acid sequence of the VH region set forth in SEQ ID NO: 9; and two light chain variable regions that bind human TSLPR, wherein both VL regions comprise an amino acid sequence that is at least 90%, 95%, 95.5%, 96%, 96.5%, 97%, 97.5%, 98%, 98.5%, 99%, 99.5% or 100% identical to the amino acid sequence of the VL region set forth in SEQ ID NO: 12.

[0581] In some aspects, the two VH/VL domains of the anti-TSLPR antibodies or antigen-binding fragments thereof comprise two heavy chain variable regions that bind human TSLPR, wherein both VH regions comprise an amino acid sequence that is at least 90%, 95%, 95.5%, 96%, 96.5%, 97%, 97.5%, 98%, 98.5%, 99%, 99.5% or 100% identical to the amino acid sequence of the VH region set forth in SEQ ID NO: 7; and two light chain variable regions that bind human TSLPR, wherein one VL regions comprise an amino acid sequence that is at least 90%, 95%, 95.5%, 96%, 96.5%, 97%, 97.5%, 98%, 98.5%, 99%, 99.5% or 100% identical to the amino acid sequence of the VL region set forth in SEQ ID NO: 10 and one VL regions comprise an amino acid sequence that is at least 90%, 95%, 95.5%, 96%, 96.5%, 97%, 97.5%, 98%, 98.5%, 99%, 99.5% or 100% identical to the amino acid sequence of the VL region set forth in SEQ ID NO: 11.

[0582] In some aspects, the two VH/VL domains of the anti-TSLPR antibodies or antigen-binding fragments thereof comprise two heavy chain variable regions that bind human TSLPR, wherein both VH regions comprise an amino acid sequence that is at least 90%, 95%, 95.5%, 96%, 96.5%, 97%, 97.5%, 98%, 98.5%, 99%, 99.5% or 100% identical to the amino acid sequence of the VH region set forth in SEQ ID NO: 7; and two light chain variable regions that bind human TSLPR, wherein one VL regions comprise an amino acid sequence that is at least 90%, 95%, 95.5%, 96%, 96.5%, 97%, 97.5%, 98%, 98.5%, 99%, 99.5% or 100% identical to the amino acid sequence of the VL region set forth in SEQ ID NO: 10 and one VL regions comprise an amino acid sequence that is at least 90%, 95%, 95.5%, 96%, 96.5%, 97%, 97.5%, 98%, 98.5%, 99%, 99.5% or 100% identical to the amino acid sequence of the VL region set forth in SEQ ID NO: 12.

[0583] In some aspects, the two VH/VL domains of the anti-TSLPR antibodies or antigen-binding fragments thereof comprise two heavy chain variable regions that bind human TSLPR, wherein both VH regions comprise an amino acid sequence that is at least 90%, 95%, 95.5%, 96%, 96.5%, 97%, 97.5%, 98%, 98.5%, 99%, 99.5% or 100% identical to the amino acid sequence of the VH region set forth in SEQ ID NO: 7; and two light chain variable regions that bind human TSLPR, wherein one VL regions comprise an amino acid sequence that is at least 90%, 95%, 95.5%, 96%, 96.5%, 97%, 97.5%, 98%, 98.5%, 99%, 99.5% or 100% identical to the amino acid sequence of the VL region set forth in SEQ ID NO: 11 and one VL regions comprise an amino acid sequence that is at least 90%, 95%, 95.5%, 96%, 96.5%, 97%, 97.5%, 98%, 98.5%, 99%, 99.5% or 100% identical to the amino acid sequence of the VL region set forth in SEQ ID NO: 12.

[0584] In some aspects, the two VH/VL domains of the anti-TSLPR antibodies or antigen-binding fragments thereof comprise two heavy chain variable regions that bind human TSLPR, wherein both VH regions comprise an amino acid sequence that is at least 90%, 95%, 95.5%, 96%, 96.5%, 97%, 97.5%, 98%, 98.5%, 99%, 99.5% or 100% identical to the amino acid sequence of the VH region set forth in SEQ ID NO: 8; and two light chain variable regions that bind human TSLPR, wherein one VL regions comprise an amino acid sequence that is at least 90%, 95%, 95.5%, 96%, 96.5%, 97%, 97.5%, 98%, 98.5%, 99%, 99.5% or 100% identical to the amino acid sequence of the VL region set forth in SEQ ID NO: 10 and one VL regions comprise an amino acid sequence that is at least 90%, 95%, 95.5%, 96%, 96.5%, 97%, 97.5%, 98%, 98.5%, 99%, 99.5% or 100% identical to the amino acid sequence of the VL region set forth in SEQ ID NO: 11.

[0585] In some aspects, the two VH/VL domains of the anti-TSLPR antibodies or antigen-binding fragments thereof comprise two heavy chain variable regions that bind human TSLPR, wherein both VH regions comprise an amino acid sequence that is at least 90%, 95%, 95.5%, 96%, 96.5%, 97%, 97.5%, 98%, 98.5%, 99%, 99.5% or 100% identical to the amino acid sequence of the VH region set forth in SEQ ID NO: 8; and two light chain variable regions that bind human TSLPR, wherein one VL regions comprise an amino acid sequence that is at least 90%, 95%, 95.5%, 96%, 96.5%, 97%, 97.5%, 98%, 98.5%, 99%, 99.5% or 100% identical to the amino acid sequence of the VL region set forth in SEQ ID NO: 10 and one VL regions comprise an amino acid sequence that is at least 90%, 95%, 95.5%, 96%, 96.5%, 97%, 97.5%, 98%, 98.5%, 99%, 99.5% or 100% identical to the amino acid sequence of the VL region set forth in SEQ ID NO: 12.

[0586] In some aspects, the two VH/VL domains of the anti-TSLPR antibodies or antigen-binding fragments thereof comprise two heavy chain variable regions that bind human TSLPR, wherein both VH regions comprise an amino acid sequence that is at least 90%, 95%, 95.5%, 96%, 96.5%, 97%, 97.5%, 98%, 98.5%, 99%, 99.5% or 100% identical to the amino acid sequence of the VH region set forth in SEQ ID NO: 8; and two light chain variable regions that bind human TSLPR, wherein one VL regions comprise an amino acid sequence that is at least 90%, 95%, 95.5%, 96%, 96.5%, 97%, 97.5%, 98%, 98.5%, 99%, 99.5% or 100% identical to the amino acid sequence of the VL region set forth in SEQ ID NO: 11 and one VL regions comprise an amino acid sequence that is at least 90%, 95%, 95.5%, 96%, 96.5%, 97%, 97.5%, 98%, 98.5%, 99%, 99.5% or 100% identical to the amino acid sequence of the VL region set forth in SEQ ID NO: 12.

[0587] In some aspects, the two VH/VL domains of the anti-TSLPR antibodies or antigen-binding fragments thereof comprise two heavy chain variable regions that bind human TSLPR, wherein both VH regions comprise an amino acid sequence that is at least 90%, 95%, 95.5%, 96%, 96.5%, 97%, 97.5%, 98%, 98.5%, 99%, 99.5% or 100% identical to the amino acid sequence of the VH region set forth in SEQ ID NO: 9; and two light chain variable regions that bind human TSLPR, wherein one VL regions comprise an amino acid sequence that is at least 90%, 95%, 95.5%, 96%, 96.5%, 97%, 97.5%, 98%, 98.5%, 99%, 99.5% or 100% identical to the amino acid sequence of the VL region set forth in SEQ ID NO: 10 and one VL regions comprise an amino acid sequence that is at least 90%, 95%, 95.5%, 96%, 96.5%, 97%, 97.5%, 98%, 98.5%, 99%, 99.5% or 100% identical to the amino acid sequence of the VL region set forth in SEQ ID NO: 11.

[0588] In some aspects, the two VH/VL domains of the anti-TSLPR antibodies or antigen-binding fragments thereof comprise two heavy chain variable regions that bind human TSLPR, wherein both VH regions comprise an amino acid sequence that is at least 90%, 95%, 95.5%, 96%, 96.5%, 97%, 97.5%, 98%, 98.5%, 99%, 99.5% or 100% identical to the amino acid sequence of the VH region set forth in SEQ ID NO: 9; and two light chain variable regions that bind human TSLPR, wherein one VL regions comprise an amino acid sequence that is at least 90%, 95%, 95.5%, 96%, 96.5%, 97%, 97.5%, 98%, 98.5%, 99%, 99.5% or 100% identical to the amino acid sequence of the VL region set forth in SEQ ID NO: 10 and one VL regions comprise an amino acid sequence that is at least 90%, 95%, 95.5%, 96%, 96.5%, 97%, 97.5%, 98%, 98.5%, 99%, 99.5% or 100% identical to the amino acid sequence of the VL region set forth in SEQ ID NO: 12.

[0589] In some aspects, the two VH/VL domains of the anti-TSLPR antibodies or antigen-binding fragments thereof comprise two heavy chain variable regions that bind human TSLPR, wherein both VH regions comprise an amino acid sequence that is at least 90%, 95%, 95.5%, 96%, 96.5%, 97%, 97.5%, 98%, 98.5%, 99%, 99.5% or 100% identical to the amino acid sequence of the VH region set forth in SEQ ID NO: 9; and two light chain variable regions that bind human TSLPR, wherein one VL regions comprise an amino acid sequence that is at least 90%, 95%, 95.5%, 96%, 96.5%, 97%, 97.5%, 98%, 98.5%, 99%, 99.5% or 100% identical to the amino acid sequence of the VL region set forth in SEQ ID NO: 11 and one VL regions comprise an amino acid sequence that is at least 90%, 95%, 95.5%, 96%, 96.5%, 97%, 97.5%, 98%, 98.5%, 99%, 99.5% or 100% identical to the amino acid sequence of the VL region set forth in SEQ ID NO: 12.

[0590] In some aspects, the anti-TSLPR antibodies or antigen-binding fragments thereof comprising two different heavy chain variable regions that bind TSLPR and/or two different light chain variable regions that bind human TSLPR, wherein one VH region comprises an amino acid sequence that is at least 90%, 95%, 95.5%, 96%, 96.5%, 97%, 97.5%, 98%, 98.5%, 99%, 99.5% or 100% identical to the amino acid sequence of the VH region set forth in SEQ ID NO: 7 and one VL region comprises an amino acid sequence that is at least 90%, 95%, 95.5%, 96%, 96.5%, 97%, 97.5%, 98%, 98.5%, 99%, 99.5% or 100% identical to the amino acid sequence of the VL region set forth in SEQ ID NO: 11 or 12; or wherein one VH region comprises an amino acid sequence that is at least 90%, 95%, 95.5%, 96%, 96.5%, 97%, 97.5%, 98%, 98.5%, 99%, 99.5% or 100% identical to the amino acid sequence of the VH region set forth in SEQ ID NO: 8 and one VL region comprises an amino acid sequence that is at least 90%, 95%, 95.5%, 96%, 96.5%, 97%, 97.5%, 98%, 98.5%, 99%, 99.5% or 100% identical to the amino acid sequence of the VL region set forth in SEQ ID NO: 10 or 12; or wherein one VH region comprises an amino acid sequence that is at least 90%, 95%, 95.5%, 96%, 96.5%, 97%, 97.5%, 98%, 98.5%, 99%, 99.5% or 100% identical to the amino acid sequence of the VH region set forth in SEQ ID NO: 9 and one VL region comprises an amino acid sequence that is at least 90%, 95%, 95.5%, 96%, 96.5%, 97%, 97.5%, 98%, 98.5%, 99%, 99.5% or 100% identical to the amino acid sequence of the VL region set forth in SEQ ID NO: 10 or 11; the anti-TSLPR antibodies or antigen-binding fragments thereof further comprise a heavy chain constant domain (CH1) and a light chain constant domain (LC) that, when expressed in a cell favor assembly of SEQ ID NO: 7 VH with SEQ ID NO: 11 or 12 VL; SEQ ID NO: 8 VH with SEQ ID NO: 10 or 12 VL; and/or SEQ ID NO: 9 VH with SEQ ID NO: 10 or 11 VL over assembly of SEQ ID NO: 7 VH with SEQ ID NO: 10 VL; SEQ ID NO: 8 VH with SEQ ID NO: 11 VL; and/or SEQ ID NO: 9 VH with SEQ ID NO: 12 VL.

[0591] In some aspects, the VH/VL chains are assembled in a cell using “knob into hole” CH1 and LC domains. In some aspects, the VH/VL chains are assembled in a cell using charge engineered CH1 and LC domains as disclosed herein.

[0592] In some aspects, antibodies or antigen-binding fragments thereof comprise a functional part, derivative and/or analogue of the antibodies or antigen-binding fragments thereof described herein. The variant maintains the binding specificity of the antibody or antigen-binding fragment thereof. The functional part, derivative and/or analogue maintains the binding specificity of the antibody or antigen-binding fragment thereof.

[0593] In some aspects, the antibody or antigen-binding fragment thereof of the disclosure is a human or humanized antibody or antigen-binding fragment thereof comprising an antigen-binding site that binds TSLPR, wherein the variable domain comprising the TSLPR binding site comprises a VH CDR3 sequence selected from SEQ ID NO: 15, 18, 21, 44, 45, 56, 57, 68, and 69.

[0594] In some aspects, the VH variable region comprising the TSLPR binding site preferably comprises the sequence of the CDR1 region, CDR2 region and the CDR3 region of a VH chain comprising an amino acid of SEQ ID NO: 13-21, 40-45, 52-57, or 64-69.

[0595] In some aspects, the VL variable region comprising the TSLPR binding site preferably comprises the sequence of the CDR1 region, CDR2 region and the CDR3 region of a VL chain comprising an amino acid of SEQ ID NO: 22-30, 46-51, 58-63, or 70-75.

[0596] In some aspects, the CDRs of a VH chain comprising SEQ ID NO: 13-21, 40-45, 52-57, or 64-69 are grafted on framework regions 1, 2, 3, and/or 4 (FR1, FR2, FR3, and FR4) of a human heavy and light chain immunoglobulin or of an immunoglobulin of another mammal.

[0597] In some aspects, provided is a human or humanized antibody or antigen-binding fragment thereof comprising an antigen-binding site that binds TSLPR, wherein the variable domain comprising the TSLPR binding site comprises a VH CDR sequence comprising an amino acid sequence comprising SEQ ID NO: 13-21, 40-45, 52-57, or 64-69 and a VL CDR sequence comprising an amino acid sequence comprising SEQ ID NO: 22-30, 46-51, 58-63, or 70-75.

### V. Anti-TSLPR x Anti-CD3e Antibodies

[0598] In one aspect, provided herein are novel anti-TSLPR x anti-CD3e antibodies. In embodiments, the anti-TSLPR x anti-CD3e antibodies are useful for the treatment of a TSLPR related condition (e.g., a B-cell Acute Lymphoblastic Leukemia).

[0599] The anti-TSLPR x anti-CD3e antibodies are multivalent and include at least two antigen binding domains (ABDs), wherein at least one antigen binding domain is a TSLPR binding domain and at least one antigen binding domain is a CD3 epsilon (CD3e) binding domain. Any suitable TSLPR binding domain and CD3e binding domain can be included in the subject anti-TSLPR x anti-CD3e antibodies, including, for example, the TSLPR binding domains and CD3e binding domains provided herein.

[0600] The antigen binding domains provided herein generally include a variable heavy domain (VH) having a VH-CDR1, VH-CDR-2, and VH-CDR-3; and a variable light domain (VL), and a variable light domain (VL) having a VL-CDR1, VL-CDR-2, and VL-CDR-3.

[0601] In addition, as discussed above, the numbering used in the sequence listing and figures for the identification of the CDRs is Kabat, however, different numbering can be used, which will change the amino acid sequences of the CDRs as shown in Table 2.

[0602] For all of the variable heavy and light domains listed herein, further variants can be made. As outlined herein, in some embodiments the set of 6 CDRs can have from 0, 1, 2, 3, 4 or 5 amino acid modifications (with amino acid substitutions finding particular use), as well as changes in the framework regions of the variable heavy and light domains, as long as the frameworks (excluding the CDRs) retain at least about 80, 85, 90, 95 or 99% identity to a human germline sequence selected from those listed in FIG. 1 of U.S. Pat. No. 7,657,380, which Figure and Legend is incorporated by reference in its entirety herein. Thus, for example, the identical CDRs as described herein can be combined with different framework sequences from human germline sequences, as long as the framework regions retain at least 80, 85 or 90% identity to a human germline sequence selected from those listed in FIG. 1 of U.S. Pat. No. 7,657,380. Alternatively, the CDRs can have amino acid modifications (e.g., from 1, 2, 3, 4 or 5 amino acid modifications in the set of CDRs (that is, the CDRs can be modified as long as the total number of changes in the set of 6 CDRs is less than 6 amino acid modifications, with any combination of CDRs being changed; e.g., there may be one change in vlCDR1, two in vhCDR2, none in vhCDR3, etc.)), as well as having framework region changes, as long as the framework regions retain at least 80, 85, 95 to 99% identity to a human germline sequence selected from those listed in FIG. 1 of U.S. Pat. No. 7,657,380.

[0603] As will be appreciated by those in the art, any set of 6 CDRs or VH and VL domains can be in the scFv format or in the Fab format, which is then added to the heavy and light constant domains, where the heavy constant domains comprise variants (including within the CH1 domain as well as the Fc domain).

[0604] In addition, in embodiments wherein the subject antibody includes an scFv, the scFv can be in an orientation from N- to C-terminus of VH-scFv linker-VL or VL-scFv linker-VH. In some formats, one or more of the ABDs generally is a Fab that includes a VH domain on one protein chain (generally as a component of a heavy chain) and a VL on another protein chain (generally as a component of a light chain). Exemplary scFv linkers for use in the subject antibodies are depicted in FIG. 5.

[0605] In some embodiments, the anti-TSLPR x anti-CD3e antibody is a bispecific antibody. In some embodiments, the anti-TSLPR x anti-CD3e antibody is a bivalent antibody. In some embodiments, the anti-TSLPR x anti-CD3e antibody is a trivalent antibody. In some embodiments, the anti-TSLPR x anti-CD3e antibody is a bispecific, bivalent antibody. In some embodiments, the anti-TSLPR x anti-CD3e antibodies include one TSLPR binding domain and one CD3e binding domain. In exemplary embodiments, the anti-TSLPR x anti-CD3e antibody is a bispecific, trivalent antibody. In some embodiments, the anti-TSLPR x anti-CD3e antibodies include one CD3e binding domain and two TSLPR binding domains.

[0606] The anti-TSLPR x anti-CD3e antibodies provided herein can be in any useful format, including, including, for example, canonical immunoglobulin, as well as the “1+1 Fab-scFv-Fc,” and “2+1 Fab2-scFv-Fc,” formats described herein (FIG. 23). In some embodiments, the anti-TSLPR x anti-CD3e antibodies are heterodimeric bispecific antibodies that include variant Fc domains having any of the heterodimerization skew variants, pI variants and/or ablation variants described herein. See, e.g. FIGS. 12-14.

[0607] Note that unless specified herein, the order of the antigen list in the name does not confer structure; that is an anti-TSLPR x anti-CD3e 1+1 Fab-scFv-Fc antibody can have the scFv bind to CD3e or TSLPR, although in some cases, the order specifies structure as indicated.

[0608] The anti-TSLPR x anti-CD3e antibodies provided herein further include different antibody domains. As described herein and known in the art, the antibodies described herein include different domains within the heavy and light chains, which can be overlapping as well. These domains include, but are not limited to, the Fc domain, the CH1 domain, the CH2 domain, the CH3 domain, the hinge domain, the heavy constant domain (CH1-hinge-Fc domain or CH1-hinge-CH2-CH3), the variable heavy domain, the variable light domain, the light constant domain, Fab domains and scFv domains.

[0609] As shown herein, there are a number of suitable linkers (for use as either domain linkers or scFv linkers) that can be used to covalently attach the recited domains (e.g., scFvs, Fabs, Fc domains, VH domains, VL domains, etc.), including traditional peptide bonds, generated by recombinant techniques. Exemplary linkers to attach domains of the subject antibody to each other are depicted in FIG. 6. In some embodiments, the linker peptide may predominantly include the following amino acid residues: Gly, Ser, Ala, or Thr. The linker peptide should have a length that is adequate to link two molecules in such a way that they assume the correct conformation relative to one another so that they retain the desired activity. In one embodiment, the linker is from about 1 to 50 amino acids in length, preferably about 1 to 30 amino acids in length. In one embodiment, linkers of 1 to 20 amino acids in length may be used, with from about 5 to about 10 amino acids finding use in some embodiments. Useful linkers include glycine-serine polymers, including for example (GS)n, (GSGGS)n, (GGGGS)n, and (GGGS)n, where n is an integer of at least one (and generally from 3 to 4), glycine-alanine polymers, alanine-serine polymers, and other flexible linkers. Alternatively, a variety of nonproteinaceous polymers, including but not limited to polyethylene glycol (PEG), polypropylene glycol, polyoxyalkylenes, or copolymers of polyethylene glycol and polypropylene glycol, may find use as linkers.

[0610] Other linker sequences may include any sequence of any length of CL/CH1 domain but not all residues of CL/CH1 domain; for example the first 5-12 amino acid residues of the CL/CH1 domains. Linkers can be derived from immunoglobulin light chain, for example Cκ or Cλ. Linkers can be derived from immunoglobulin heavy chains of any isotype, including for example Cγ1, Cγ2, Cγ3, Cγ4, Cα1, Cα2, Cδ, Cε, and Cμ. Linker sequences may also be derived from other proteins such as Ig-like proteins (e.g., TCR, FcR, KIR), hinge region-derived sequences, and other natural sequences from other proteins.

[0611] In some embodiments, the linker is a “domain linker”, used to link any two domains as outlined herein together. For example, in the 2+1 Fab2-scFv-Fc format, there may be a domain linker that attaches the C-terminus of the CH1 domain of the Fab to the N-terminus of the scFv, with another optional domain linker attaching the C-terminus of the scFv to the CH2 domain (although in many embodiments the hinge is used as this domain linker). While any suitable linker can be used, many embodiments utilize a glycine-serine polymer as the domain linker, including for example (GS)n, (GSGGS)n, (GGGGS)n, and (GGGS)n, where n is an integer of at least one (and generally from 3 to 4 to 5) as well as any peptide sequence that allows for recombinant attachment of the two domains with sufficient length and flexibility to allow each domain to retain its biological function. In some cases, and with attention being paid to “strandedness”, as outlined below, charged domain linkers, as used in some embodiments of scFv linkers can be used. Exemplary useful domain linkers are depicted in FIG. 16.

[0612] In some embodiments, the linker is a scFv linker that is used to covalently attach the VH and VL domains as discussed herein. In many cases, the scFv linker is a charged scFv linker, a number of which are shown in FIG. 15. Accordingly, provided herein are charged scFv linkers, to facilitate the separation in pI between a first and a second monomer. That is, by incorporating a charged scFv linker, either positive or negative (or both, in the case of scaffolds that use scFvs on different monomers), this allows the monomer comprising the charged linker to alter the pI without making further changes in the Fc domains. These charged linkers can be substituted into any scFv containing standard linkers. Again, as will be appreciated by those in the art, charged scFv linkers are used on the correct “strand” or monomer, according to the desired changes in pI. For example, as discussed herein, to make 1+1 Fab-scFv-Fc format heterodimeric antibody, the original pI of the Fv region for each of the desired antigen binding domains are calculated, and one is chosen to make an scFv, and depending on the pI, either positive or negative linkers are chosen. Charged domain linkers can also be used to increase the pI separation of the monomers of the invention as well, and thus those included in FIG. 6 can be used in any embodiment herein where a linker is utilized.

[0613] Exemplary subject anti-TSLPR x anti-CD3e antibodies are depicted, for example, in FIG. 24. During the cell culture production of the anti-TSLPR x anti-CD3e antibodies provided herein, the C-terminal lysine residue or C-terminal lysine and glycine residues may be cleaved from the heavy chain monomers, thereby leading to variants with C-terminal “clipping.” See, e.g., Jiang et al., Journal of Pharmaceutical Sciences 105:2066-2072 (2016). Thus, in some embodiments provided herein, the anti-TSLPR x anti-CD3e antibody is a variant of one of the anti-TSLPR x anti-CD3e antibodies includes a deletion of a C-terminal lysine (−K) terminal or C-terminal lysine and glycine (−GK) residues in one or both Fc domains of an anti-TSLPR x anti-CD3e antibody described herein. In some embodiments, the deletion is G446del and/or K447del (EU numbering).

[0614] Aspects of the anti-TSLPR x anti-CD3e antibodies are further described in detail below.

### A. TSLPR Binding Domains

[0615] The anti-TSLPR x anti-CD3e antibodies provided herein include at least one TSLPR binding domain that binds to the ECD of human TSLPR. Any suitable TSLPR binding domain can be included in the anti-TSLPR x anti-CD3e antibodies provided herein. In embodiments, the TSLPR binding domain is capable of binding to the extracellular domain of human TSLPR. In embodiments, the TSLPR binding domain is capable of binding to residue 25 to 230 of human TSLPR.

[0616] As will be appreciated by those in the art, suitable TSLPR binding domains can comprise a set of 6 CDRs as depicted in Tables 3-10, or identified using other alignments within the variable heavy (VH) domain and variable light domain (VL) sequences of the following TSLPR binding domains: Clone 1B7 (SEQ ID NOs: 7 and 10), Clone 1C3 (SEQ ID NOs: 8 and 11), Clone 1A9 (SEQ ID NOs: 9 and 12), Clone 2E4 (SEQ ID NOs: 76 and 148), Clone 2H8 (SEQ ID NOs: 77 and 149), Clone 3E5 (SEQ ID NOs: 78 and 150), Clone 1A10 (SEQ ID NOs: 79 and 151), Clone 1B9 (SEQ ID NOs: 80 and 152), Clone 1D10 (SEQ ID NOs: 81 and 153), Clone 1F6 (SEQ ID NOs: 82 and 154), Clone 1G3 (SEQ ID NOs: 83 and 155), Clone 3D8 (SEQ ID NOs: 84 and 156), Clone 10C4 (SEQ ID NOs: 85 and 157), Clone 2A4 (SEQ ID NOs: 86 and 158), Clone 2B2 (SEQ ID NOs: 87 and 159), Clone 2D11 (SEQ ID NOs: 88 and 160), Clone 2E6 (SEQ ID NOs: 89 and 161), Clone 2F1 (SEQ ID NOs: 90 and 162), Clone 2F5 (SEQ ID NOs: 91 and 163), Clone 2H1 (SEQ ID NOs: 92 and 164), and Clone 2H4 (SEQ ID NOs: 93 and 165). Suitable TSLPR binding domains can also include the entire VH and VL sequences as depicted in these sequences, used as scFvs or as Fabs. Additional suitable TSLPR binding domains and related vhCDR1-3, vlCDR1-3, and VH/VL sequences that can be used in the subject anti-TSLPR x anti-CD3e antibodies include those disclosed in U.S. Pat. No. 8,475,793 (See, e.g., FIGS. 1-3, Table 2 and Table 3, and hu13H5, h70E8, and h54C11), U.S. Pat. No. 8,097,705 (see, e.g., FIG. 5), and US2012/0020988 (see, e.g., VH domains of SEQ ID NOs: 9 and 16, and VL domains of SEQ ID NOs: 11, 14, 18, and 19), which are all incorporated by reference, particularly in pertinent parts relating to anti-TSLPR antibodies, TSLPR binding domains, and related vhCDR1-3, vlCDR1-3, and VH/VL sequences. In some embodiments, suitable TSLPR binding domains for use in anti-TSLPR x anti-CD3e antibody are capable of binding to residue 25 to 230 of human TSLPR.

[0617] In one embodiment, the TSLPR antigen binding domain includes the 6 CDRs (i.e., vhCDR1-3 and vlCDR1-3) of any of the TSLPR binding domains described herein, including, but not limited to the following TSLPR binding domains: Clone 1B7 (SEQ ID NOs: 7 and 10), Clone 1C3 (SEQ ID NOs: 8 and 11), Clone 1A9 (SEQ ID NOs: 9 and 12), Clone 2E4 (SEQ ID NOs: 76 and 148), Clone 2H8 (SEQ ID NOs: 77 and 149), Clone 3E5 (SEQ ID NOs: 78 and 150), Clone 1A10 (SEQ ID NOs: 79 and 151), Clone 1B9 (SEQ ID NOs: 80 and 152), Clone 1D10 (SEQ ID NOs: 81 and 153), Clone 1F6 (SEQ ID NOs: 82 and 154), Clone 1G3 (SEQ ID NOs: 83 and 155), Clone 3D8 (SEQ ID NOs: 84 and 156), Clone 10C4 (SEQ ID NOs: 85 and 157), Clone 2A4 (SEQ ID NOs: 86 and 158), Clone 2B2 (SEQ ID NOs: 87 and 159), Clone 2D11 (SEQ ID NOs: 88 and 160), Clone 2E6 (SEQ ID NOs: 89 and 161), Clone 2F1 (SEQ ID NOs: 90 and 162), Clone 2F5 (SEQ ID NOs: 91 and 163), Clone 2H1 (SEQ ID NOs: 92 and 164), and Clone 2H4 (SEQ ID NOs: 93 and 165). In some embodiments, the TSLPR binding domain includes a VH/VL pair selected from the VHs and VLs of one of the following TSLPR binding domains: Clone 1B7 (SEQ ID NOs: 7 and 10), Clone 1C3 (SEQ ID NOs: 8 and 11), Clone 1A9 (SEQ ID NOs: 9 and 12), Clone 2E4 (SEQ ID NOs: 76 and 148), Clone 2H8 (SEQ ID NOs: 77 and 149), Clone 3E5 (SEQ ID NOs: 78 and 150), Clone 1A10 (SEQ ID NOs: 79 and 151), Clone 1B9 (SEQ ID NOs: 80 and 152), Clone 1D10 (SEQ ID NOs: 81 and 153), Clone 1F6 (SEQ ID NOs: 82 and 154), Clone 1G3 (SEQ ID NOs: 83 and 155), Clone 3D8 (SEQ ID NOs: 84 and 156), Clone 10C4 (SEQ ID NOs: 85 and 157), Clone 2A4 (SEQ ID NOs: 86 and 158), Clone 2B2 (SEQ ID NOs: 87 and 159), Clone 2D11 (SEQ ID NOs: 88 and 160), Clone 2E6 (SEQ ID NOs: 89 and 161), Clone 2F1 (SEQ ID NOs: 90 and 162), Clone 2F5 (SEQ ID NOs: 91 and 163), Clone 2H1 (SEQ ID NOs: 92 and 164), and Clone 2H4 (SEQ ID NOs: 93 and 165).

[0618] In addition to the parental CDR sets disclosed in the figures and sequence listing that form an binding domain to TSLPR, provided herein are variant TSLPR binding domains having CDRs that include at least one modification of the TSLPR binding domain CDRs disclosed herein (e.g., (see Tables 3-10 and the sequence listing). In one embodiment, the TSLPR binding domain of the subject anti-TSLPR x anti-CD3e antibody includes a set of 6 CDRs with 1, 2, 3, 4, 5, 6, 7, 8, 9, 10 amino acid modifications as compared to the 6 CDRs of a TSLPR binding domain as described herein, including the figures and sequence listing. In exemplary embodiments, the TSLPR binding domain of the subject anti-TSLPR x anti-CD3e antibody includes a set of 6 CDRs with 1, 2, 3, 4, 5, 6, 7, 8, 9, 10 amino acid modifications as compared to the 6 CDRs of one of the following TSLPR binding domains: Clone 1B7 (SEQ ID NOs: 7 and 10), Clone 1C3 (SEQ ID NOs: 8 and 11), Clone 1A9 (SEQ ID NOs: 9 and 12), Clone 2E4 (SEQ ID NOs: 76 and 148), Clone 2H8 (SEQ ID NOs: 77 and 149), Clone 3E5 (SEQ ID NOs: 78 and 150), Clone 1A10 (SEQ ID NOs: 79 and 151), Clone 1B9 (SEQ ID NOs: 80 and 152), Clone 1D10 (SEQ ID NOs: 81 and 153), Clone 1F6 (SEQ ID NOs: 82 and 154), Clone 1G3 (SEQ ID NOs: 83 and 155), Clone 3D8 (SEQ ID NOs: 84 and 156), Clone 10C4 (SEQ ID NOs: 85 and 157), Clone 2A4 (SEQ ID NOs: 86 and 158), Clone 2B2 (SEQ ID NOs: 87 and 159), Clone 2D11 (SEQ ID NOs: 88 and 160), Clone 2E6 (SEQ ID NOs: 89 and 161), Clone 2F1 (SEQ ID NOs: 90 and 162), Clone 2F5 (SEQ ID NOs: 91 and 163), Clone 2H1 (SEQ ID NOs: 92 and 164), and Clone 2H4 (SEQ ID NOs: 93 and 165). In certain embodiments, the TSLPR binding domain of the subject anti-TSLPR x anti-CD3e antibody is capable of binding TSLPR antigen, as measured by at least one of a Biacore, surface plasmon resonance (SPR), flow cytometry, and/or BLI (biolayer interferometry, e.g., Octet assay) assay, with the latter finding particular use in many embodiments. In particular embodiments, the TSLPR binding domain is capable of binding human TSLPR antigen.

[0619] In some embodiments, the TSLPR binding domain of the subject anti-TSLPR x anti-CD3e antibody includes 6 CDRs that are at least 90, 95, 97, 98 or 99% identical to the 6 CDRs of a TSLPR binding domain as described herein, including the figures and sequence listing. In exemplary embodiments, the TSLPR binding domain of the subject anti-TSLPR x anti-CD3e antibody includes 6 CDRs that are at least 90, 95, 97, 98 or 99% identical to the 6 CDRs of one of the following TSLPR binding domains: Clone 1B7 (SEQ ID NOs: 7 and 10), Clone 1C3 (SEQ ID NOs: 8 and 11), Clone 1A9 (SEQ ID NOs: 9 and 12), Clone 2E4 (SEQ ID NOs: 76 and 148), Clone 2H8 (SEQ ID NOs: 77 and 149), Clone 3E5 (SEQ ID NOs: 78 and 150), Clone 1A10 (SEQ ID NOs: 79 and 151), Clone 1B9 (SEQ ID NOs: 80 and 152), Clone 1D10 (SEQ ID NOs: 81 and 153), Clone 1F6 (SEQ ID NOs: 82 and 154), Clone 1G3 (SEQ ID NOs: 83 and 155), Clone 3D8 (SEQ ID NOs: 84 and 156), Clone 10C4 (SEQ ID NOs: 85 and 157), Clone 2A4 (SEQ ID NOs: 86 and 158), Clone 2B2 (SEQ ID NOs: 87 and 159), Clone 2D11 (SEQ ID NOs: 88 and 160), Clone 2E6 (SEQ ID NOs: 89 and 161), Clone 2F1 (SEQ ID NOs: 90 and 162), Clone 2F5 (SEQ ID NOs: 91 and 163), Clone 2H1 (SEQ ID NOs: 92 and 164), and Clone 2H4 (SEQ ID NOs: 93 and 165). In certain embodiments, the TSLPR binding domain is capable of binding to the TSLPR, as measured by at least one of a Biacore, surface plasmon resonance (SPR), flow cytometry, and/or BLI (biolayer interferometry, e.g., Octet assay) assay, with the latter finding particular use in many embodiments. In particular embodiments, the TSLPR binding domain is capable of binding human TSLPR antigen.

[0620] In another exemplary embodiment, the TSLPR binding domain of the subject anti-TSLPR x anti-CD3e antibody includes the variable heavy (VH) domain and variable light (VL) domain of any one of the TSLPR binding domains described herein, including the figures and sequence listing. In exemplary embodiments, the TSLPR binding domain is one of the following TSLPR binding domains: Clone 1B7 (SEQ ID NOs: 7 and 10), Clone 1C3 (SEQ ID NOs: 8 and 11), Clone 1A9 (SEQ ID NOs: 9 and 12), Clone 2E4 (SEQ ID NOs: 76 and 148), Clone 2H8 (SEQ ID NOs: 77 and 149), Clone 3E5 (SEQ ID NOs: 78 and 150), Clone 1A10 (SEQ ID NOs: 79 and 151), Clone 1B9 (SEQ ID NOs: 80 and 152), Clone 1D10 (SEQ ID NOs: 81 and 153), Clone 1F6 (SEQ ID NOs: 82 and 154), Clone 1G3 (SEQ ID NOs: 83 and 155), Clone 3D8 (SEQ ID NOs: 84 and 156), Clone 10C4 (SEQ ID NOs: 85 and 157), Clone 2A4 (SEQ ID NOs: 86 and 158), Clone 2B2 (SEQ ID NOs: 87 and 159), Clone 2D11 (SEQ ID NOs: 88 and 160), Clone 2E6 (SEQ ID NOs: 89 and 161), Clone 2F1 (SEQ ID NOs: 90 and 162), Clone 2F5 (SEQ ID NOs: 91 and 163), Clone 2H1 (SEQ ID NOs: 92 and 164), and Clone 2H4 (SEQ ID NOs: 93 and 165).

[0621] In some embodiments, the anti-TSLPR x anti-CD3e antibody includes a TSLPR binding domain that includes a variable heavy domain and/or a variable light domain that are variants of a TSLPR binding domain VH and VL domain disclosed herein. In one embodiment, the variant VH domain and/or VL domain has from 1, 2, 3, 4, 5, 6, 7, 8, 9 or 10 amino acid changes from a VH and/or VL domain of a TSLPR binding domain described herein, including the figures and sequence listing. In exemplary embodiments, the variant VH domain and/or VL domain has from 1, 2, 3, 4, 5, 6, 7, 8, 9 or 10 amino acid changes from a VH and/or VL domain of one of the following TSLPR binding domains: Clone 1B7 (SEQ ID NOs: 7 and 10), Clone 1C3 (SEQ ID NOs: 8 and 11), Clone 1A9 (SEQ ID NOs: 9 and 12), Clone 2E4 (SEQ ID NOs: 76 and 148), Clone 2H8 (SEQ ID NOs: 77 and 149), Clone 3E5 (SEQ ID NOs: 78 and 150), Clone 1A10 (SEQ ID NOs: 79 and 151), Clone 1B9 (SEQ ID NOs: 80 and 152), Clone 1D10 (SEQ ID NOs: 81 and 153), Clone 1F6 (SEQ ID NOs: 82 and 154), Clone 1G3 (SEQ ID NOs: 83 and 155), Clone 3D8 (SEQ ID NOs: 84 and 156), Clone 10C4 (SEQ ID NOs: 85 and 157), Clone 2A4 (SEQ ID NOs: 86 and 158), Clone 2B2 (SEQ ID NOs: 87 and 159), Clone 2D11 (SEQ ID NOs: 88 and 160), Clone 2E6 (SEQ ID NOs: 89 and 161), Clone 2F1 (SEQ ID NOs: 90 and 162), Clone 2F5 (SEQ ID NOs: 91 and 163), Clone 2H1 (SEQ ID NOs: 92 and 164), and Clone 2H4 (SEQ ID NOs: 93 and 165). In some embodiments, the changes are in a VH domain. In some embodiments, the changes are in a VL domain. In some embodiments, the changes are in a VH and VL domain. In some embodiments, the one or more amino acid changes are in the VH and/or VL framework regions (FR1, FR2, FR3, and/or FR4). In some embodiments, the one or more amino acid change(s) are in one or more CDRs. In certain embodiments, the TSLPR binding domain is capable of binding to TSLPR, as measured by at least one of a Biacore, surface plasmon resonance (SPR), flow cytometry, and/or BLI (biolayer interferometry, e.g., Octet assay) assay, with the latter finding particular use in many embodiments. In particular embodiments, the TSLPR binding domain is capable of binding human TSLPR antigen.

[0622] In one embodiment, the variant VH and/or VL domain is at least 90, 95, 97, 98 or 99% identical to the VH and/or VL of a TSLPR binding domain as described herein, including the figures and sequence listing. In exemplary embodiments, the variant VH and/or VL domain is at least 90, 95, 97, 98 or 99% identical to the VH and/or VL of one of the following TSLPR binding domains: Clone 1B7 (SEQ ID NOs: 7 and 10), Clone 1C3 (SEQ ID NOs: 8 and 11), Clone 1A9 (SEQ ID NOs: 9 and 12), Clone 2E4 (SEQ ID NOs: 76 and 148), Clone 2H8 (SEQ ID NOs: 77 and 149), Clone 3E5 (SEQ ID NOs: 78 and 150), Clone 1A10 (SEQ ID NOs: 79 and 151), Clone 1B9 (SEQ ID NOs: 80 and 152), Clone 1D10 (SEQ ID NOs: 81 and 153), Clone 1F6 (SEQ ID NOs: 82 and 154), Clone 1G3 (SEQ ID NOs: 83 and 155), Clone 3D8 (SEQ ID NOs: 84 and 156), Clone 10C4 (SEQ ID NOs: 85 and 157), Clone 2A4 (SEQ ID NOs: 86 and 158), Clone 2B2 (SEQ ID NOs: 87 and 159), Clone 2D11 (SEQ ID NOs: 88 and 160), Clone 2E6 (SEQ ID NOs: 89 and 161), Clone 2F1 (SEQ ID NOs: 90 and 162), Clone 2F5 (SEQ ID NOs: 91 and 163), Clone 2H1 (SEQ ID NOs: 92 and 164), and Clone 2H4 (SEQ ID NOs: 93 and 165). In certain embodiments, the TSLPR binding domain is capable of binding to TSLPR, as measured by at least one of a Biacore, surface plasmon resonance (SPR), flow cytometry, and/or BLI (biolayer interferometry, e.g., Octet assay) assay, with the latter finding particular use in many embodiments. In particular embodiments, the TSLPR binding domain is capable of binding human TSLPR antigen.

[0623] In some embodiments, the anti-TSLPR x anti-CD3e antibody includes a TSLPR binding domain that includes a VH and VL selected from the following:
[0624] (i) a VH comprising a vhCDR1, a vhCDR2, and a vhCDR3 having an amino acid sequence of a vhCDR1, a vhCDR2, and a vhCDR3, respectively, of a VH having an amino acid sequence of SEQ ID NO:7 or a variant thereof; and (ii) a VL comprising a vlCDR1, a vlCDR2, and a vlCDR3 having an amino acid sequence of a vlCDR1, a vlCDR2, and a vlCDR3, respectively, of a VL having an amino acid sequence of SEQ ID NO: 10 or a variant thereof; or
[0625] (i) a VH comprising a vhCDR1, a vhCDR2, and a vhCDR3 having an amino acid sequence of a vhCDR1, a vhCDR2, and a vhCDR3, respectively, of a VH having an amino acid sequence of SEQ ID NO:8 or a variant thereof; and (ii) a VL comprising a vlCDR1, a vlCDR2, and a vlCDR3 having an amino acid sequence of a vlCDR1, a vlCDR2, and a vlCDR3, respectively, of a VL having an amino acid sequence of SEQ ID NO:11 or a variant thereof; or
[0626] (i) a VH comprising a vhCDR1, a vhCDR2, and a vhCDR3 having an amino acid sequence of a vhCDR1, a vhCDR2, and a vhCDR3, respectively, of a VH having an amino acid sequence of SEQ ID NO:9 or a variant thereof; and (ii) a VL comprising a vlCDR1, a vlCDR2, and a vlCDR3 having an amino acid sequence of a vlCDR1, a vlCDR2, and a vlCDR3, respectively, of a VL having an amino acid sequence of SEQ ID NO: 12 or a variant thereof; or
[0627] (i) a VH comprising a vhCDR1, a vhCDR2, and a vhCDR3 having an amino acid sequence of a vhCDR1, a vhCDR2, and a vhCDR3, respectively, of a VH having an amino acid sequence of SEQ ID NO:76 or a variant thereof; and (ii) a VL comprising a vlCDR1, a vlCDR2, and a vlCDR3 having an amino acid sequence of a vlCDR1, a vlCDR2, and a vlCDR3, respectively, of a VL having an amino acid sequence of SEQ ID NO: 148 or a variant thereof; or
[0628] (i) a VH comprising a vhCDR1, a vhCDR2, and a vhCDR3 having an amino acid sequence of a vhCDR1, a vhCDR2, and a vhCDR3, respectively, of a VH having an amino acid sequence of SEQ ID NO:77 or a variant thereof; and (ii) a VL comprising a vlCDR1, a vlCDR2, and a vlCDR3 having an amino acid sequence of a vlCDR1, a vlCDR2, and a vlCDR3, respectively, of a VL having an amino acid sequence of SEQ ID NO: 149 or a variant thereof; or
[0629] (i) a VH comprising a vhCDR1, a vhCDR2, and a vhCDR3 having an amino acid sequence of a vhCDR1, a vhCDR2, and a vhCDR3, respectively, of a VH having an amino acid sequence of SEQ ID NO:78 or a variant thereof; and (ii) a VL comprising a vlCDR1, a vlCDR2, and a vlCDR3 having an amino acid sequence of a vlCDR1, a vlCDR2, and a vlCDR3, respectively, of a VL having an amino acid sequence of SEQ ID NO: 150 or a variant thereof; or
[0630] (i) a VH comprising a vhCDR1, a vhCDR2, and a vhCDR3 having an amino acid sequence of a vhCDR1, a vhCDR2, and a vhCDR3, respectively, of a VH having an amino acid sequence of SEQ ID NO:79 or a variant thereof; and (ii) a VL comprising a vlCDR1, a vlCDR2, and a vlCDR3 having an amino acid sequence of a vlCDR1, a vlCDR2, and a vlCDR3, respectively, of a VL having an amino acid sequence of SEQ ID NO:151 or a variant thereof; or
[0631] (i) a VH comprising a vhCDR1, a vhCDR2, and a vhCDR3 having an amino acid sequence of a vhCDR1, a vhCDR2, and a vhCDR3, respectively, of a VH having an amino acid sequence of SEQ ID NO:80 or a variant thereof; and (ii) a VL comprising a vlCDR1, a vlCDR2, and a vlCDR3 having an amino acid sequence of a vlCDR1, a vlCDR2, and a vlCDR3, respectively, of a VL having an amino acid sequence of SEQ ID NO: 152 or a variant thereof; or
[0632] (i) a VH comprising a vhCDR1, a vhCDR2, and a vhCDR3 having an amino acid sequence of a vhCDR1, a vhCDR2, and a vhCDR3, respectively, of a VH having an amino acid sequence of SEQ ID NO:81 or a variant thereof; and (ii) a VL comprising a vlCDR1, a vlCDR2, and a vlCDR3 having an amino acid sequence of a vlCDR1, a vlCDR2, and a vlCDR3, respectively, of a VL having an amino acid sequence of SEQ ID NO: 153 or a variant thereof; or
[0633] (i) a VH comprising a vhCDR1, a vhCDR2, and a vhCDR3 having an amino acid sequence of a vhCDR1, a vhCDR2, and a vhCDR3, respectively, of a VH having an amino acid sequence of SEQ ID NO:82 or a variant thereof; and (ii) a VL comprising a vlCDR1, a vlCDR2, and a vlCDR3 having an amino acid sequence of a vlCDR1, a vlCDR2, and a vlCDR3, respectively, of a VL having an amino acid sequence of SEQ ID NO:154 or a variant thereof; or
[0634] (i) a VH comprising a vhCDR1, a vhCDR2, and a vhCDR3 having an amino acid sequence of a vhCDR1, a vhCDR2, and a vhCDR3, respectively, of a VH having an amino acid sequence of SEQ ID NO:83 or a variant thereof; and (ii) a VL comprising a vlCDR1, a vlCDR2, and a vlCDR3 having an amino acid sequence of a vlCDR1, a vlCDR2, and a vlCDR3, respectively, of a VL having an amino acid sequence of SEQ ID NO: 155 or a variant thereof; or
[0635] (i) a VH comprising a vhCDR1, a vhCDR2, and a vhCDR3 having an amino acid sequence of a vhCDR1, a vhCDR2, and a vhCDR3, respectively, of a VH having an amino acid sequence of SEQ ID NO:84 or a variant thereof; and (ii) a VL comprising a vlCDR1, a vlCDR2, and a vlCDR3 having an amino acid sequence of a vlCDR1, a vlCDR2, and a vlCDR3, respectively, of a VL having an amino acid sequence of SEQ ID NO: 156 or a variant thereof; or
[0636] (i) a VH comprising a vhCDR1, a vhCDR2, and a vhCDR3 having an amino acid sequence of a vhCDR1, a vhCDR2, and a vhCDR3, respectively, of a VH having an amino acid sequence of SEQ ID NO:85 or a variant thereof; and (ii) a VL comprising a vlCDR1, a vlCDR2, and a vlCDR3 having an amino acid sequence of a vlCDR1, a vlCDR2, and a vlCDR3, respectively, of a VL having an amino acid sequence of SEQ ID NO: 157 or a variant thereof; or
[0637] (i) a VH comprising a vhCDR1, a vhCDR2, and a vhCDR3 having an amino acid sequence of a vhCDR1, a vhCDR2, and a vhCDR3, respectively, of a VH having an amino acid sequence of SEQ ID NO:86 or a variant thereof; and (ii) a VL comprising a vlCDR1, a vlCDR2, and a vlCDR3 having an amino acid sequence of a vlCDR1, a vlCDR2, and a vlCDR3, respectively, of a VL having an amino acid sequence of SEQ ID NO: 158 or a variant thereof; or
[0638] (i) a VH comprising a vhCDR1, a vhCDR2, and a vhCDR3 having an amino acid sequence of a vhCDR1, a vhCDR2, and a vhCDR3, respectively, of a VH having an amino acid sequence of SEQ ID NO:87 or a variant thereof; and (ii) a VL comprising a vlCDR1, a vlCDR2, and a vlCDR3 having an amino acid sequence of a vlCDR1, a vlCDR2, and a vlCDR3, respectively, of a VL having an amino acid sequence of SEQ ID NO: 159 or a variant thereof; or
[0639] (i) a VH comprising a vhCDR1, a vhCDR2, and a vhCDR3 having an amino acid sequence of a vhCDR1, a vhCDR2, and a vhCDR3, respectively, of a VH having an amino acid sequence of SEQ ID NO:88 or a variant thereof; and (ii) a VL comprising a vlCDR1, a vlCDR2, and a vlCDR3 having an amino acid sequence of a vlCDR1, a vlCDR2, and a vlCDR3, respectively, of a VL having an amino acid sequence of SEQ ID NO:160 or a variant thereof; or
[0640] (i) a VH comprising a vhCDR1, a vhCDR2, and a vhCDR3 having an amino acid sequence of a vhCDR1, a vhCDR2, and a vhCDR3, respectively, of a VH having an amino acid sequence of SEQ ID NO:89 or a variant thereof; and (ii) a VL comprising a vlCDR1, a vlCDR2, and a vlCDR3 having an amino acid sequence of a vlCDR1, a vlCDR2, and a vlCDR3, respectively, of a VL having an amino acid sequence of SEQ ID NO: 161 or a variant thereof; or
[0641] (i) a VH comprising a vhCDR1, a vhCDR2, and a vhCDR3 having an amino acid sequence of a vhCDR1, a vhCDR2, and a vhCDR3, respectively, of a VH having an amino acid sequence of SEQ ID NO:90 or a variant thereof; and (ii) a VL comprising a vlCDR1, a vlCDR2, and a vlCDR3 having an amino acid sequence of a vlCDR1, a vlCDR2, and a vlCDR3, respectively, of a VL having an amino acid sequence of SEQ ID NO: 162 or a variant thereof; or
[0642] (i) a VH comprising a vhCDR1, a vhCDR2, and a vhCDR3 having an amino acid sequence of a vhCDR1, a vhCDR2, and a vhCDR3, respectively, of a VH having an amino acid sequence of SEQ ID NO:91 or a variant thereof; and (ii) a VL comprising a vlCDR1, a vlCDR2, and a vlCDR3 having an amino acid sequence of a vlCDR1, a vlCDR2, and a vlCDR3, respectively, of a VL having an amino acid sequence of SEQ ID NO: 163 or a variant thereof; or
[0643] (i) a VH comprising a vhCDR1, a vhCDR2, and a vhCDR3 having an amino acid sequence of a vhCDR1, a vhCDR2, and a vhCDR3, respectively, of a VH having an amino acid sequence of SEQ ID NO:92 or a variant thereof; and (ii) a VL comprising a vlCDR1, a vlCDR2, and a vlCDR3 having an amino acid sequence of a vlCDR1, a vlCDR2, and a vlCDR3, respectively, of a VL having an amino acid sequence of SEQ ID NO:164 or a variant thereof; or
[0644] (i) a VH comprising a vhCDR1, a vhCDR2, and a vhCDR3 having an amino acid sequence of a vhCDR1, a vhCDR2, and a vhCDR3, respectively, of a VH having an amino acid sequence of SEQ ID NO:93 or a variant thereof; and (ii) a VL comprising a vlCDR1, a vlCDR2, and a vlCDR3 having an amino acid sequence of a vlCDR1, a vlCDR2, and a vlCDR3, respectively, of a VL having an amino acid sequence of SEQ ID NO: 165 or a variant thereof (see, e.g., Tables 3-10).

[0645] In some embodiments, the anti-TSLPR x anti-CD3e antibody includes a TSLPR binding domain that includes a VH and VL selected from the following:
[0646] (i) a VH having an amino acid sequence of SEQ ID NO:7 or a variant thereof; and (ii) a VL having an amino acid sequence of SEQ ID NO: 10 or a variant thereof; or
[0647] (i) a VH having an amino acid sequence of SEQ ID NO:8 or a variant thereof; and (ii) a VL having an amino acid sequence of SEQ ID NO:11 or a variant thereof; or
[0648] (i) a VH having an amino acid sequence of SEQ ID NO:9 or a variant thereof; and (ii) a VL having an amino acid sequence of SEQ ID NO:12 or a variant thereof; or
[0649] (i) a VH having an amino acid sequence of SEQ ID NO:76 or a variant thereof; and (ii) a VL having an amino acid sequence of SEQ ID NO: 148 or a variant thereof; or
[0650] (i) a VH having an amino acid sequence of SEQ ID NO:77 or a variant thereof; and (ii) a VL having an amino acid sequence of SEQ ID NO: 149 or a variant thereof; or
[0651] (i) a VH having an amino acid sequence of SEQ ID NO:78 or a variant thereof; and (ii) a VL having an amino acid sequence of SEQ ID NO: 150 or a variant thereof; or
[0652] (i) a VH having an amino acid sequence of SEQ ID NO:79 or a variant thereof; and (ii) a VL having an amino acid sequence of SEQ ID NO: 151 or a variant thereof; or
[0653] (i) a VH having an amino acid sequence of SEQ ID NO:80 or a variant thereof; and (ii) a VL having an amino acid sequence of SEQ ID NO: 152 or a variant thereof; or
[0654] (i) a VH having an amino acid sequence of SEQ ID NO:81 or a variant thereof; and (ii) a VL having an amino acid sequence of SEQ ID NO: 153 or a variant thereof; or
[0655] (i) a VH having an amino acid sequence of SEQ ID NO:82 or a variant thereof; and (ii) a VL having an amino acid sequence of SEQ ID NO:154 or a variant thereof; or
[0656] (i) a VH having an amino acid sequence of SEQ ID NO:83 or a variant thereof; and (ii) a VL having an amino acid sequence of SEQ ID NO: 155 or a variant thereof; or
[0657] (i) a VH having an amino acid sequence of SEQ ID NO:84 or a variant thereof; and (ii) a VL having an amino acid sequence of SEQ ID NO:156 or a variant thereof; or
[0658] (i) a VH having an amino acid sequence of SEQ ID NO:85 or a variant thereof; and (ii) a VL having an amino acid sequence of SEQ ID NO:157 or a variant thereof; or
[0659] (i) a VH having an amino acid sequence of SEQ ID NO:86 or a variant thereof; and (ii) a VL having an amino acid sequence of SEQ ID NO:158 or a variant thereof; or
[0660] (i) a VH having an amino acid sequence of SEQ ID NO:87 or a variant thereof; and (ii) a VL having an amino acid sequence of SEQ ID NO: 159 or a variant thereof; or
[0661] (i) a VH having an amino acid sequence of SEQ ID NO:88 or a variant thereof; and (ii) a VL having an amino acid sequence of SEQ ID NO: 160 or a variant thereof; or
[0662] (i) a VH having an amino acid sequence of SEQ ID NO:89 or a variant thereof; and (ii) a VL having an amino acid sequence of SEQ ID NO: 161 or a variant thereof; or
[0663] (i) a VH having an amino acid sequence of SEQ ID NO:90 or a variant thereof; and (ii) a VL having an amino acid sequence of SEQ ID NO: 162 or a variant thereof; or
[0664] (i) a VH having an amino acid sequence of SEQ ID NO:91 or a variant thereof; and (ii) a VL having an amino acid sequence of SEQ ID NO:163 or a variant thereof; or
[0665] (i) a VH having an amino acid sequence of SEQ ID NO:92 or a variant thereof; and (ii) a VL having an amino acid sequence of SEQ ID NO:164 or a variant thereof; or
[0666] (i) a VH having an amino acid sequence of SEQ ID NO:93 or a variant thereof; and (ii) a VL having an amino acid sequence of SEQ ID NO:165 or a variant thereof.

### B. CD3 Epsilon (CD3e) Binding Domains

[0667] The anti-TSLPR x anti-CD3e antibodies provided herein include at least one CD3 epsilon (CD3e) binding domain. Any suitable CD3e binding domain can be included in the anti-TSLPR x anti-CD3e antibodies provided herein. In embodiments, the CD3e binding domain is capable of binding to human CD3e (e.g., N-terminus ECD of human CD3e).

[0668] As will be appreciated by those in the art, suitable CD3e binding domains can comprise a set of 6 CDRs as depicted in the sequence listing and FIGS. 24A-E, either as the CDRs are underlined or, in the case where a different numbering scheme is used as described herein and as shown in Table 2, as the CDRs that are identified using other alignments within the variable heavy (VH) domain and variable light domain (VL) sequences of those depicted in FIGS. 24A-E, and the sequence listing (see Table 2). Suitable CD3e binding domains can also include the entire VH and VL sequences as depicted in these sequences and figures, used as scFvs or as Fab domains. Additional suitable CD3e binding domains and related vhCDR1-3, vlCDR1-3, VH, and VL sequences that can be used in the subject anti-TSLPR x anti-CD3e antibodies include those disclosed in U.S. Pat. No. 7,635,472 (see, e.g., SEQ ID NOs: 65 and 67), U.S. Pat. No. 9,975,949 (see, e.g., SEQ ID NOs: 57 and 58), U.S. Pat. No. 9,657,102 (see, e.g., SEQ ID NOs: 1250, 1266, 1282, 1298, and 1314 (VH), and SEQ ID NOs: 1258, 1274, 1290, 1306, and 1322 (VL)), U.S. Pat. No. 9,969,809 (see, e.g., SEQ ID NOs: 112 and 38), which are all incorporated by reference, particularly in pertinent parts relating to anti-CD3e antibodies, CD3e binding domains, and related vhCDR1-3, vlCDR1-3, and VH/VL sequences. In some embodiments, suitable CD3e binding domains for use in anti-TSLPR x anti-CD3e antibody is capable of binding to the extracellular domain of human CD3e (e.g., amino acids 1-15 of human CD3e).

[0669] In one embodiment, the CD3e binding domain of the anti-TSLPR x anti-CD3e antibody includes the 6 CDRs (i.e., vhCDR1-3 and vlCDR1-3) of a CD3e binding domain described herein, including the Figures and sequence listing. In some embodiments, the anti-TSLPR x anti-CD3e antibody includes the 6 CDRs (i.e., vhCDR1-3 and vlCDR1-3) of a CD3e binding domain depicted in FIGS. 24A-E. In exemplary embodiments, the CD3e binding domain is one of the following CD3e binding domains [anti-CD3]_H1.30_L1.47, [anti-CD3]_H1.32_L1.47, [anti-CD3]_H1.89_L1.47, [anti-CD3]_H1.90_L1.47, [anti-CD3]_H1.33_L1.47, and [anti-CD3]_H1.31_L1.47 (FIGS. 24A-E).

[0670] In addition to the parental CDR sets disclosed in the figures and sequence listing that form an binding domain to CD3e, provided herein are variant CD3e binding domains having CDRs that include at least one modification of the CD3e binding domain CDRs disclosed herein. In one embodiment, the CD3e binding domain includes a set of 6 CDRs with 1, 2, 3, 4, 5, 6, 7, 8, 9, 10 amino acid modifications as compared to the 6 CDRs of a CD3e binding domain described herein, including the figures and sequence listing. In exemplary embodiments, the CD3e binding domain of the anti-TSLPR x anti-CD3e antibody includes a set of 6 CDRs with 1, 2, 3, 4, 5, 6, 7, 8, 9, 10 amino acid modifications as compared to the 6 CDRs of one of the following CD3e binding domains: [anti-CD3]_H1.30_L1.47, [anti-CD3]_H1.32_L1.47, [anti-CD3]_H1.89_L1.47, [anti-CD3]_H1.90_L1.47, [anti-CD3]_H1.33_L1.47, and [anti-CD3]_H1.31_L1.47 (FIGS. 24A-E). In certain embodiments, the variant CD3e binding domain is capable of binding CD3e antigen, as measured by at least one of a Biacore, surface plasmon resonance (SPR), flow cytometry, and/or BLI (biolayer interferometry, e.g., Octet assay) assay, with the latter finding particular use in many embodiments. In particular embodiments, the CD3e binding domain is capable of binding human CD3e antigen (see FIG. 14).

[0671] In one embodiment, the CD3e binding domain of the anti-TSLPR x anti-CD3e antibody includes 6 CDRs that are at least 90, 95, 97, 98 or 99% identical to the 6 CDRs of a CD3e binding domain as described herein, including the figures and sequence listing. In exemplary embodiments, the CD3e binding domain includes 6 CDRs that are at least 90, 95, 97, 98 or 99% identical to the 6 CDRs of one of the following CD3e binding domains: [anti-CD3]_H1.30_L1.47, [anti-CD3]_H1.32_L1.47, [anti-CD3]_H1.89_L1.47, [anti-CD3]_H1.90_L1.47, [anti-CD3]_H1.33_L1.47, and [anti-CD3]_H1.31_L1.47 (FIGS. 24A-E). In certain embodiments, the CD3e binding domain is capable of binding to CD3e antigen, as measured by at least one of a Biacore, surface plasmon resonance (SPR), flow cytometry, and/or BLI (biolayer interferometry, e.g., Octet assay) assay, with the latter finding particular use in many embodiments. In particular embodiments, the CD3e binding domain is capable of binding human CD3e antigen (see FIG. 14).

[0672] In another exemplary embodiment, the CD3e binding domain of the anti-TSLPR x anti-CD3e antibody include the variable heavy (VH) domain and variable light (VL) domain of any one of the CD3e binding domains described herein, including the figures and sequence listing. In exemplary embodiments, the CD3e binding domain is one of the following CD3e binding domains: [anti-CD3]_H1.30_L1.47, [anti-CD3]_H1.32_L1.47, [anti-CD3]_H1.89_L1.47, [anti-CD3]_H1.90_L1.47, [anti-CD3]_H1.33_L1.47, and [anti-CD3]_H1.31_L1.47 (FIGS. 24A-E).

[0673] In addition to the parental CD3e variable heavy and variable light domains disclosed herein, provided herein are CD3e binding domains that include a variable heavy domain and/or a variable light domain that are variants of a CD3e binding domain VH and VL domain disclosed herein. In one embodiment, the variant VH domain and/or VL domain has from 1, 2, 3, 4, 5, 6, 7, 8, 9 or 10 amino acid changes from a VH and/or VL domain of a CD3e binding domain described herein, including the figures and sequence listing. In exemplary embodiments, the variant VH domain and/or VL domain has from 1, 2, 3, 4, 5, 6, 7, 8, 9 or 10 amino acid changes from a VH and/or VL domain of one of the following CD3e binding domains: [anti-CD3]_H1.30_L1.47, [anti-CD3]_H1.32_L1.47, [anti-CD3]_H1.89_L1.47, [anti-CD3]_H1.90_L1.47, [anti-CD3]_H1.33_L1.47, and [anti-CD3]_H1.31_L1.47 (FIGS. 24A-E). In some embodiments, the changes are in a VH domain. In some embodiments, the changes are in a VL domain. In some embodiments, the changes are in a VH and VL domain. In some embodiments, the one or more amino acid changes are in the VH and/or VL framework regions (FR1, FR2, FR3, and/or FR4). In some embodiments, the one or more amino acid change(s) are in one or more CDRs. In certain embodiments, the CD3e binding domain of the anti-TSLPR x anti-CD3e antibody is capable of binding to CD3e, as measured at least one of a Biacore, surface plasmon resonance (SPR), flow cytometry, and/or BLI (biolayer interferometry, e.g., Octet assay) assay, with the latter finding particular use in many embodiments. In particular embodiments, the CD3e binding domain is capable of binding human CD3e antigen.

[0674] In one embodiment, the variant VH and/or VL domain is at least 90, 95, 97, 98 or 99% identical to the VH and/or VL of a CD3e binding domain as described herein, including the figures and sequence listing. In exemplary embodiments, the variant VH and/or VL domain is at least 90, 95, 97, 98 or 99% identical to the VH and/or VL of one of the following CD3e binding domains: [anti-CD3]_H1.30_L1.47, [anti-CD3]_H1.32_L1.47, [anti-CD3]_H1.89_L1.47, [anti-CD3]_H1.90_L1.47, [anti-CD3]_H1.33_L1.47, and [anti-CD3]_H1.31_L1.47 (FIGS. 24A-E). In some embodiments, the CD3e binding domain includes a VH that is at least 90, 95, 97, 98 or 99% identical to the VH domain of one of the following CD3e binding domains: [anti-CD3]_H1.30_L1.47, [anti-CD3]_H1.32_L1.47, [anti-CD3]_H1.89_L1.47, [anti-CD3]_H1.90_L1.47, [anti-CD3]_H1.33_L1.47, and [anti-CD3]_H1.31_L1.47 (FIGS. 24A-E). In some embodiments, the CD3e binding domain includes a VL that is at least 90, 95, 97, 98 or 99% identical to the VL domain of one of the following CD3e binding domains: [anti-CD3]_H1.30_L1.47, [anti-CD3]_H1.32_L1.47, [anti-CD3]_H1.89_L1.47, [anti-CD3]_H1.90_L1.47, [anti-CD3]_H1.33_L1.47, and [anti-CD3]_H1.31_L1.47 (FIGS. 24A-E). In some embodiments, the CD3e binding domain includes a VH and a VL that is at least 90, 95, 97, 98 or 99% identical to a VH domain and a VL domain of one of the following CD3e binding domains: [anti-CD3]_H1.30_L1.47, [anti-CD3]_H1.32_L1.47, [anti-CD3]_H1.89_L1.47, [anti-CD3]_H1.90_L1.47, [anti-CD3]_H1.33_L1.47, and [anti-CD3]_H1.31_L1.47 (FIGS. 24A-E). In certain embodiments, the CD3e binding domain of the anti-TSLPR x anti-CD3e antibody is capable of binding to the CD3e, as measured by at least one of a Biacore, surface plasmon resonance (SPR), flow cytometry, and/or BLI (biolayer interferometry, e.g., Octet assay) assay, with the latter finding particular use in many embodiments. In particular embodiments, the CD3e binding domain is capable of binding human CD3e antigen.

[0675] In some embodiments, the anti-TSLPR x anti-CD3e antibody is a bivalent antibody (e.g., 1+1 Fab-scFv-Fc format antibody) that includes one CD3e binding domain. In other embodiments, the anti-TSLPR x anti-CD3e antibody is a trivalent antibody (e.g., 2+1 mAb-scFv and 2+1 Fab2-scFv-Fc format antibodies) that includes two CD3e binding domains.

### C. Chimeric and Humanized Antibodies

[0676] In certain embodiments, the subject antibodies provided herein include a heavy chain variable region from a particular germline heavy chain immunoglobulin gene and/or a light chain variable region from a particular germline light chain immunoglobulin gene. For example, such antibodies may comprise or consist of a human antibody comprising heavy or light chain variable regions that are “the product of” or “derived from” a particular germline sequence. A human antibody that is “the product of” or “derived from” a human germline immunoglobulin sequence can be identified as such by comparing the amino acid sequence of the human antibody to the amino acid sequences of human germline immunoglobulins and selecting the human germline immunoglobulin sequence that is closest in sequence (i.e., greatest % identity) to the sequence of the human antibody (using the methods outlined herein). A human antibody that is “the product of” or “derived from” a particular human germline immunoglobulin sequence may contain amino acid differences as compared to the germline sequence, due to, for example, naturally-occurring somatic mutations or intentional introduction of site-directed mutation. However, a humanized antibody typically is at least 90% identical in amino acids sequence to an amino acid sequence encoded by a human germline immunoglobulin gene and contains amino acid residues that identify the antibody as being derived from human sequences when compared to the germline immunoglobulin amino acid sequences of other species (e.g., murine germline sequences). In certain cases, a humanized antibody may be at least 95, 96, 97, 98 or 99%, or even at least 96%, 97%, 98%, or 99% identical in amino acid sequence to the amino acid sequence encoded by the germline immunoglobulin gene. Typically, a humanized antibody derived from a particular human germline sequence will display no more than 10⁻²⁰ amino acid differences from the amino acid sequence encoded by the human germline immunoglobulin gene (prior to the introduction of any skew, pI and ablation variants herein; that is, the number of variants is generally low, prior to the introduction of the variants of the invention). In certain cases, the humanized antibody may display no more than 5, or even no more than 4, 3, 2, or 1 amino acid difference from the amino acid sequence encoded by the germline immunoglobulin gene (again, prior to the introduction of any skew, pI and ablation variants herein; that is, the number of variants is generally low, prior to the introduction of the variants of the invention).

[0677] In one embodiment, the parent antibody has been affinity matured, as is known in the art. Structure-based methods may be employed for humanization and affinity maturation, for example as described in U.S. Ser. No. 11/004,590. Selection based methods may be employed to humanize and/or affinity mature antibody variable regions, including but not limited to methods described in Wu et al., 1999, J. Mol. Biol. 294:151-162; Baca et al., 1997, J. Biol. Chem. 272 (16): 10678-10684; Rosok et al., 1996, J. Biol. Chem. 271 (37): 22611-22618; Rader et al., 1998, Proc. Natl. Acad. Sci. USA 95: 8910-8915; Krauss et al., 2003, Protein Engineering 16 (10): 753-759, all entirely incorporated by reference. Other humanization methods may involve the grafting of only parts of the CDRs, including but not limited to methods described in U.S. Ser. No. 09/810,510; Tan et al., 2002, J. Immunol. 169:1119-1125; De Pascalis et al., 2002, J. Immunol. 169:3076-3084, all entirely incorporated by reference.

### D. Heterodimeric Antibodies

[0678] In exemplary embodiments, the anti-TSLPR x anti-CD3e antibodies provided herein are heterodimeric bispecific antibodies that include two variant Fc domain sequences. Such variant Fc domains include amino acid modifications to facilitate the self-assembly and/or purification of the heterodimeric antibodies.

[0679] An ongoing problem in antibody technologies is the desire for “bispecific” antibodies that bind to two different antigens simultaneously, in general thus allowing the different antigens to be brought into proximity and resulting in new functionalities and new therapies. In general, these antibodies are made by including genes for each heavy and light chain into the host cells. This generally results in the formation of the desired heterodimer (A-B), as well as the two homodimers (A-A and B-B (not including the light chain heterodimeric issues)). However, a major obstacle in the formation of bispecific antibodies is the difficulty in biasing the formation of the desired heterodimeric antibody over the formation of the homodimers and/or purifying the heterodimeric antibody away from the homodimers.

[0680] There are a number of mechanisms that can be used to generate the subject heterodimeric antibodies. In addition, as will be appreciated by those in the art, these different mechanisms can be combined to ensure high heterodimerization. Amino acid modifications that facilitate the production and purification of heterodimers are collectively referred to generally as “heterodimerization variants.” As discussed below, heterodimerization variants include “skew” variants (e.g., the “knobs and holes” and the “charge pairs” variants described below) as well as “pI variants,” which allow purification of heterodimers from homodimers. As is generally described in U.S. Pat. No. 9,605,084, hereby incorporated by reference in its entirety and specifically as below for the discussion of heterodimerization variants, useful mechanisms for heterodimerization include “knobs and holes” (“KIH”) as described in U.S. Pat. No. 9,605,084, “electrostatic steering” or “charge pairs” as described in U.S. Pat. No. 9,605,084, pI variants as described in U.S. Pat. No. 9,605,084, and general additional Fc variants as outlined in U.S. Pat. No. 9,605,084 and below.

[0681] Heterodimerization variants that are useful for the formation and purification of the subject heterodimeric antibody (e.g., bispecific antibodies) are further discussed in detailed below.

### 1. Skew Variants

[0682] In some embodiments, the heterodimeric antibody includes skew variants which are one or more amino acid modifications in a first Fc domain (A) and/or a second Fc domain (B) that favor the formation of Fc heterodimers (Fc dimers that include the first and the second Fc domain; (A-B) over Fc homodimers (Fc dimers that include two of the first Fc domain or two of the second Fc domain; A-A or B-B). Suitable skew variants are included in the FIG. 29 of US Publ. App. No. 2016/0355608, hereby incorporated by reference in its entirety and specifically for its disclosure of skew variants, as well as in FIGS. 12 and 18.

[0683] One particular type of skew variants is generally referred to in the art as “knobs and holes,” referring to amino acid engineering that creates steric influences to favor heterodimeric formation and disfavor homodimeric formation, as described in U.S. Ser. No. 61/596,846, Ridgway et al., Protein Engineering 9 (7): 617 (1996); Atwell et al., J. Mol. Biol. 1997 270:26; U.S. Pat. No. 8,216,805, all of which are hereby incorporated by reference in their entirety and specifically for the disclosure of “knobs and holes” mutations. This is sometime referred to herein as “steric variants.” The figures identify a number of “monomer A-monomer B” pairs that rely on “knobs and holes”. In addition, as described in Merchant et al., Nature Biotech. 16:677 (1998), these “knobs and holes” mutations can be combined with disulfide bonds to further favor formation of Fc heterodimers.

[0684] Another method that finds use in the generation of heterodimers is sometimes referred to as “electrostatic steering” as described in Gunasekaran et al., J. Biol. Chem. 285 (25): 19637 (2010), hereby incorporated by reference in its entirety. This is sometimes referred to herein as “charge pairs”. In this embodiment, electrostatics are used to skew the formation towards heterodimerization. As those in the art will appreciate, these may also have an effect on pI, and thus on purification, and thus could in some cases also be considered pI variants. However, as these were generated to force heterodimerization and were not used as purification tools, they are classified as “skew variants”. These include, but are not limited to, D221E/P228E/L368E paired with D221R/P228R/K409R (e.g., these are “monomer corresponding sets) and C220E/P228E/368E paired with C220R/E224R/P228R/K409R.

[0685] In some embodiments, the skew variants advantageously and simultaneously favor heterodimerization based on both the “knobs and holes” mechanism as well as the “electrostatic steering” mechanism. In some embodiments, the heterodimeric antibody includes one or more sets of such heterodimerization skew variants. These variants come in “pairs” of “sets”. That is, one set of the pair is incorporated into the first monomer and the other set of the pair is incorporated into the second monomer. It should be noted that these sets do not necessarily behave as “knobs in holes” variants, with a one-to-one correspondence between a residue on one monomer and a residue on the other. That is, these pairs of sets may instead form an interface between the two monomers that encourages heterodimer formation and discourages homodimer formation, allowing the percentage of heterodimers that spontaneously form under biological conditions to be over 90%, rather than the expected 50% (25% homodimer A/A: 50% heterodimer A/B: 25% homodimer B/B). Exemplary heterodimerization “skew” variants are depicted in FIG. 1. Such “skew” variants include, but are not limited to: S364K/E357Q: L368D/K370S; L368D/K370S: S364K; L368E/K370S: S364K; T411T/E360E/Q362E: D401K; L368D/K370S: S364K/E357L; K370S: S364K/E357Q (EU numbering).

[0686] In exemplary embodiments, the heterodimeric antibody includes a S364K/E357Q: L368D/K370S; L368D/K370S: S364K; L368E/K370S: S364K; T411T/E360E/Q362E: D401K; L368D/K370S: S364K/E357L; K370S: S364K/E357Q; or a T366S/L368A/Y407V: T366W (optionally including a bridging disulfide, T366S/L368A/Y407V/Y349C: T366W/S354C) or T366S/L368A/Y407V/Y354C: T366W/S349C “skew” variant amino acid substitution set (EU numbering). In an exemplary embodiment, the heterodimeric antibody includes a “S364K/E357Q: L368D/K370S” amino acid substitution set. In terms of nomenclature, the pair “S364K/E357Q: L368D/K370S” means that one of the monomers includes an Fc domain that includes the amino acid substitutions S364K and E357Q and the other monomer includes an Fc domain that includes the amino acid substitutions L368D and K370S; as above, the “strandedness” of these pairs depends on the starting pI.

[0687] In some embodiments, Fc heterodimerization domains that result in heterodimerization of two different Fc domains comprise amino acid variants in the Fc domain including, but not limited to, these pairs: S364K/E357Q: L368D/K370S; L368D/K370S: S364K; L368E/K370S: S364K; T411T/E360E/Q362E: D401K; L368D/K370S: S364K/E357L; K370S: S364K/E357Q; or a T366S/L368A/Y407V: T366W (optionally including a bridging disulfide, T366S/L368A/Y407V/Y349C: T366W/S354C or T366S/L368A/Y407V/Y354C: T366W/S349C) “skew” variant amino acid substitution set (EU numbering), as well as others in FIG. 1. In general, these heterodimerization Fc variants are made in human IgG1, IgG2 or IgG4 backbones.

[0688] In some embodiments, the skew variants provided herein can be optionally and independently incorporated with any other modifications, including, but not limited to, other skew variants (see, e.g., in FIG. 37 of US Publ. App. No. 2012/0149876, herein incorporated by reference, particularly for its disclosure of skew variants), pI variants, isotypic variants, FcRn variants, ablation variants, etc. into one or both of the first and second Fc domains of the heterodimeric antibody. Further, individual modifications can also independently and optionally be included or excluded from the subject the heterodimeric antibody.

[0689] In some embodiments, the skew variants outlined herein can be optionally and independently incorporated with any pI variant (or other variants such as Fc variants, FcRn variants, etc.) into one or both heavy chain monomers, and can be independently and optionally included or excluded from the subject heterodimeric antibodies.

### 2. Purification Variants

[0690] In some embodiments, the heterodimeric antibody includes purification variants that advantageously allow for the separation of heterodimeric proteins (e.g., anti-TSLPR x anti-CD3e bispecific antibody) from homodimeric proteins.

[0691] There are several basic mechanisms that can lead to ease of purifying heterodimeric antibodies. For example, modifications to one or both of the antibody heavy chain monomers A and B such that each monomer has a different pI allows for the isoelectric purification of heterodimeric A-B antibody from monomeric A-A and B-B proteins. Alternatively, some scaffold formats, such as the “1+1 Fab-scFv-Fc” format, and the “2+1 Fab2-scFv-Fc” format, allows separation on the basis of size. As described above, it is also possible to “skew” the formation of heterodimers over homodimers using skew variants. Thus, a combination of heterodimerization skew variants and purification variants find particular use in the heterodimeric antibodies provided herein.

[0692] Additionally, as more fully outlined below, depending on the format of the heterodimeric antibody, purification variants either contained within the constant region and/or Fc domains of a monomer, and/or domain linkers can be used. In some embodiments, the heterodimeric antibody includes additional modifications for alternative functionalities that can also create pI changes, such as Fc, FcRn and KO variants.

[0693] In some embodiments, the subject heterodimeric antibodies provided herein include at least one monomer with one or more modifications that alter the pI of the monomer (i.e., a “pI variant”). In general, as will be appreciated by those in the art, there are two general categories of pI variants: those that increase the pI of the protein (basic changes) and those that decrease the pI of the protein (acidic changes). As described herein, all combinations of these variants can be done: one monomer may be wild type, or a variant that does not display a significantly different pI from wild-type, and the other can be either more basic or more acidic. Alternatively, each monomer is changed, one to more basic and one to more acidic.

[0694] Depending on the format of the heterodimer antibody, pI variants can be either contained within the constant and/or Fc domains of a monomer, or charged linkers, either domain linkers or scFv linkers, can be used. That is, antibody formats that utilize scFv(s) such as “1+1 Fab-scFv-Fc”, format can include charged scFv linkers (either positive or negative), that give a further pI boost for purification purposes. As will be appreciated by those in the art, some 1+1 Fab-scFv-Fc and 2+1 Fab2-scFv-Fc formats are useful with just charged scFv linkers and no additional pI adjustments, although the invention does provide pI variants that are on one or both of the monomers, and/or charged domain linkers as well. In addition, additional amino acid engineering for alternative functionalities may also confer pI changes, such as Fc, FcRn and KO variants.

[0695] In subject heterodimeric antibodies that utilizes pI as a separation mechanism to allow the purification of heterodimeric proteins, amino acid variants are introduced into one or both of the monomer polypeptides. That is, the pI of one of the monomers (referred to herein for simplicity as “monomer A”) can be engineered away from monomer B, or both monomer A and B change be changed, with the pI of monomer A increasing and the pI of monomer B decreasing. As is outlined more fully below, the pI changes of either or both monomers can be done by removing or adding a charged residue (e.g., a neutral amino acid is replaced by a positively or negatively charged amino acid residue, e.g., glycine to glutamic acid), changing a charged residue from positive or negative to the opposite charge (aspartic acid to lysine) or changing a charged residue to a neutral residue (e.g., loss of a charge; lysine to serine). A number of these variants are shown in the FIGS. 12 and 13.

[0696] Thus, in some embodiments, the subject heterodimeric antibody includes amino acid modifications in the constant regions that alter the isoelectric point (pI) of at least one, if not both, of the monomers of a dimeric protein to form “pI antibodies”) by incorporating amino acid substitutions (“pI variants” or “pI substitutions”) into one or both of the monomers. As shown herein, the separation of the heterodimers from the two homodimers can be accomplished if the pIs of the two monomers differ by as little as 0.1 pH unit, with 0.2, 0.3, 0.4 and 0.5 or greater all finding use in the present invention.

[0697] As will be appreciated by those in the art, the number of pI variants to be included on each or both monomer(s) to get good separation will depend in part on the starting pI of the components, for example in the 1+1 Fab-scFv-Fc, and 2+1 Fab2-scFv-Fc formats, the starting pI of the scFv (1+1 Fab-scFv-Fc, 2+1 Fab2-scFv-Fc) and Fab(s) of interest. That is, to determine which monomer to engineer or in which “direction” (e.g., more positive or more negative), the Fv sequences of the two target antigens are calculated and a decision is made from there. As is known in the art, different Fvs will have different starting pIs which are exploited in the present invention. In general, as outlined herein, the pIs are engineered to result in a total pI difference of each monomer of at least about 0.1 logs, with 0.2 to 0.5 being preferred as outlined herein.

[0698] In the case where pI variants are used to achieve heterodimerization, by using the constant region(s) of the heavy chain(s), a more modular approach to designing and purifying bispecific proteins, including antibodies, is provided. Thus, in some embodiments, heterodimerization variants (including skew and pI heterodimerization variants) are not included in the variable regions, such that each individual antibody must be engineered. In addition, in some embodiments, the possibility of immunogenicity resulting from the pI variants is significantly reduced by importing pI variants from different IgG isotypes such that pI is changed without introducing significant immunogenicity. Thus, an additional problem to be solved is the elucidation of low pI constant domains with high human sequence content, e.g., the minimization or avoidance of non-human residues at any particular position. Alternatively or in addition to isotypic substitutions, the possibility of immunogenicity resulting from the pI variants is significantly reduced by utilizing isosteric substitutions (e.g. Asn to Asp; and Gln to Glu).

[0699] As discussed below, a side benefit that can occur with this pI engineering is also the extension of serum half-life and increased FcRn binding. That is, as described in US Publ. App. No. US 2012/0028304 (incorporated by reference in its entirety), lowering the pI of antibody constant domains (including those found in antibodies and Fc fusions) can lead to longer serum retention in vivo. These pI variants for increased serum half-life also facilitate pI changes for purification.

[0700] In addition, it should be noted that the pI variants give an additional benefit for the analytics and quality control process of bispecific antibodies, as the ability to either eliminate, minimize and distinguish when homodimers are present is significant. Similarly, the ability to reliably test the reproducibility of the heterodimeric antibody production is important.

[0701] In general, embodiments of particular use rely on sets of variants that include skew variants, which encourage heterodimerization formation over homodimerization formation, coupled with pI variants, which increase the pI difference between the two monomers to facilitate purification of heterodimers away from homodimers.

[0702] Exemplary combinations of pI variants are shown in FIGS. 12 and 13, and FIG. 30 of US Publ. App. No. 2016/0355608, all of which are herein incorporated by reference in its entirety and specifically for the disclosure of pI variants. Preferred combinations of pI variants are shown in FIGS. 12 and 13. As outlined herein and shown in the figures, these changes are shown relative to IgG1, but all isotypes can be altered this way, as well as isotype hybrids. In the case where the heavy chain constant domain is from IgG2-4, R133E and R133Q can also be used.

[0703] In one embodiment, a preferred combination of pI variants has one monomer (the negative Fab side) comprising 208D/295E/384D/418E/421D variants (N208D/Q295E/N384D/Q418E/N421D when relative to human IgG1) and a second monomer (the positive scFv side) comprising a positively charged scFv linker, including (GKPGS)₄ (SEQ ID NO:238). However, as will be appreciated by those in the art, the first monomer includes a CH1 domain, including position 208. Accordingly, in constructs that do not include a CH1 domain (for example for antibodies that do not utilize a CH1 domain on one of the domains), a preferred negative pI variant Fc set includes 295E/384D/418E/421D variants (Q295E/N384D/Q418E/N421D when relative to human IgG1).

[0704] Accordingly, in some embodiments, one monomer has a set of substitutions from FIG. 4 and the other monomer has a charged linker (either in the form of a charged scFv linker because that monomer comprises an scFv or a charged domain linker, as the format dictates, which can be selected from those depicted in FIG. 5).

[0705] In some embodiments, modifications are made in the hinge of the Fc domain, including positions 216, 217, 218, 219, 220, 221, 222, 223, 224, 225, 226, 227, 228, 229, and 230 based on EU numbering. Thus, pI mutations and particularly substitutions can be made in one or more of positions 216-230, with 1, 2, 3, 4 or 5 mutations finding use. Again, all possible combinations are contemplated, alone or with other pI variants in other domains.

[0706] Specific substitutions that find use in lowering the pI of hinge domains include, but are not limited to, a deletion at position 221, a non-native valine or threonine at position 222, a deletion at position 223, a non-native glutamic acid at position 224, a deletion at position 225, a deletion at position 235 and a deletion or a non-native alanine at position 236. In some cases, only pI substitutions are done in the hinge domain, and in others, these substitution(s) are added to other pI variants in other domains in any combination.

[0707] In some embodiments, mutations can be made in the CH2 region, including positions 233, 234, 235, 236, 274, 296, 300, 309, 320, 322, 326, 327, 334 and 339, based on EU numbering. It should be noted that changes in 233-236 can be made to increase effector function (along with 327A) in the IgG2 backbone. Again, all possible combinations of these 14 positions can be made; e.g., an antibody provided herein may include a variant Fc domain with 1, 2, 3, 4, 5, 6, 7, 8, 9 or 10 CH2 pI substitutions.

[0708] Specific substitutions that find use in lowering the pI of CH2 domains include, but are not limited to, a non-native glutamine or glutamic acid at position 274, a non-native phenylalanine at position 296, a non-native phenylalanine at position 300, a non-native valine at position 309, a non-native glutamic acid at position 320, a non-native glutamic acid at position 322, a non-native glutamic acid at position 326, a non-native glycine at position 327, a non-native glutamic acid at position 334, a non-native threonine at position 339, and all possible combinations within CH2 and with other domains.

[0709] In this embodiment, the modifications can be independently and optionally selected from position 355, 359, 362, 384, 389,392, 397, 418, 419, 444 and 447 (EU numbering) of the CH3 region. Specific substitutions that find use in lowering the pI of CH3 domains include, but are not limited to, a non-native glutamine or glutamic acid at position 355, a non-native serine at position 384, a non-native asparagine or glutamic acid at position 392, a non-native methionine at position 397, a non-native glutamic acid at position 419, a non-native glutamic acid at position 359, a non-native glutamic acid at position 362, a non-native glutamic acid at position 389, a non-native glutamic acid at position 418, a non-native glutamic acid at position 444, and a deletion or non-native aspartic acid at position 447.

[0710] In some embodiments, the anti-TSLPR x anti-CD3e antibody includes amino acid substitutions in one of its Fc domains that reduces binding to Protein A. Such purification variants produces heterodimers with asymmetric binding to Protein A, which can in turn be used for separation of heterodimeric from homodimeric populations by a pH gradient. Exemplary purification amino acid substitutions that reduce binding to Protein A include, but are not limited to H435R and Y436F (IgG1 CH3 domain, EU numbering). See, e.g., US2010331527, which is incorporated by reference in its entirety, and specifically for pertinent disclosures relating to Fc domain modifications to reduce Protein A binding.

### 3. Isotypic Variants

[0711] In addition, many embodiments of the subject heterodimeric antibodies rely on the “importation” of pI amino acids at particular positions from one IgG isotype into another, thus reducing or eliminating the possibility of unwanted immunogenicity being introduced into the variants. A number of these are shown in FIG. 21 of US Publ. 2014/0370013, hereby incorporated by reference. That is, IgG1 is a common isotype for therapeutic antibodies for a variety of reasons, including high effector function. However, the heavy constant region of IgG1 has a higher pI than that of IgG2 (8.10 versus 7.31). By introducing IgG2 residues at particular positions into the IgG1 backbone, the pI of the resulting monomer is lowered (or increased) and additionally exhibits longer serum half-life. For example, IgG1 has a glycine (pI 5.97) at position 137, and IgG2 has a glutamic acid (pI 3.22); importing the glutamic acid will affect the pI of the resulting protein. As is described below, a number of amino acid substitutions are generally required to significant affect the pI of the variant antibody. However, it should be noted as discussed below that even changes in IgG2 molecules allow for increased serum half-life.

[0712] In other embodiments, non-isotypic amino acid changes are made, either to reduce the overall charge state of the resulting protein (e.g., by changing a higher pI amino acid to a lower pI amino acid), or to allow accommodations in structure for stability, etc. as is further described below.

[0713] In addition, by pI engineering both the heavy and light constant domains, significant changes in each monomer of the heterodimer can be seen. As discussed herein, having the pIs of the two monomers differ by at least 0.5 can allow separation by ion exchange chromatography or isoelectric focusing, or other methods sensitive to isoelectric point.

### 4. Calculating pI

[0714] The pI of each monomer of the antibodies provided herein can depend on the pI of the variant heavy chain constant domain and the pI of the total monomer, including the variant heavy chain constant domain and the fusion partner. Thus, in some embodiments, the change in pI is calculated on the basis of the variant heavy chain constant domain, using the chart in the FIG. 19 of US Pub. 2014/0370013. As discussed herein, which monomer to engineer is generally decided by the inherent pI of the Fv and scaffold regions. Alternatively, the pI of each monomer can be compared.

5. pI Variants that Also Confer Better FcRn In Vivo Binding

[0715] In the case where the pI variant decreases the pI of the monomer, the pI variant can have the added benefit of improving serum retention in vivo.

[0716] Although still under examination, Fc regions are believed to have longer half-lives in vivo, because binding to FcRn at pH 6 in an endosome sequesters the Fc (Ghetie and Ward, 1997 Immunol Today. 18 (12): 592-598, entirely incorporated by reference). The endosomal compartment then recycles the Fc to the cell surface. Once the compartment opens to the extracellular space, the higher pH, ˜7.4, induces the release of Fc back into the blood. In mice, Dall'Acqua et al. showed that Fc mutants with increased FcRn binding at pH 6 and pH 7.4 actually had reduced serum concentrations and the same half-life as wild-type Fc (Dall'Acqua et al. 2002, J. Immunol. 169:5171-5180, entirely incorporated by reference). The increased affinity of Fc for FcRn at pH 7.4 is thought to forbid the release of the Fc back into the blood. Therefore, the Fc mutations that will increase Fc's half-life in vivo will ideally increase FcRn binding at the lower pH while still allowing release of Fc at higher pH. The amino acid histidine changes its charge state in the pH range of 6.0 to 7.4. Therefore, it is not surprising to find His residues at important positions in the Fc/FcRn complex.

[0717] Recently it has been suggested that antibodies with variable regions that have lower isoelectric points may also have longer serum half-lives (Igawa et al., 2010 PEDS. 23 (5): 385-392, entirely incorporated by reference). However, the mechanism of this is still poorly understood. Moreover, variable regions differ from antibody to antibody. Constant region variants with reduced pI and extended half-life would provide a more modular approach to improving the pharmacokinetic properties of antibodies, as described herein.

### E. Additional Fc Variants for Additional Functionality

[0718] In addition to the heterodimerization variants discussed above, there are a number of useful Fc amino acid modification that can be made for a variety of reasons, including, but not limited to, altering binding to one or more FcγR receptors, altered binding to FcRn receptors, etc., as discussed below.

[0719] Accordingly, the antibodies provided herein (heterodimeric, as well as homodimeric) can include such amino acid modifications with or without the heterodimerization variants outlined herein (e.g., the pI variants and steric variants). Each set of variants can be independently and optionally included or excluded from any particular heterodimeric protein.

[0720] 1. FcγR and FcRn Variants

[0721] Accordingly, there are a number of useful Fc substitutions that can be made to alter binding to one or more of the FcγR receptors. In certain embodiments, the subject antibody includes modifications that alter the binding to one or more FcγR receptors (i.e., “FcγR variants”). Substitutions that result in increased binding as well as decreased binding can be useful. For example, it is known that increased binding to FcγRIIIa generally results in increased ADCC (antibody dependent cell-mediated cytotoxicity; the cell-mediated reaction wherein nonspecific cytotoxic cells that express FcγRs recognize bound antibody on a target cell and subsequently cause lysis of the target cell). Similarly, decreased binding to FcγRIIb (an inhibitory receptor) can be beneficial as well in some circumstances. Amino acid substitutions that find use in the subject antibodies include those listed in U.S. Pat. No. 8,188,321 (particularly FIG. 41) and U.S. Pat. No. 8,084,582, and US Publ. application Nos. 20060235208 and 20070148170, all of which are expressly incorporated herein by reference in their entirety and specifically for the variants disclosed therein that affect Fcγ receptor binding. Particular variants that find use include, but are not limited to, 236A, 239D, 239E, 332E, 332D, 239D/332E, 267D, 267E, 328F, 267E/328F, 236A/332E, 239D/332E/330Y, 239D, 332E/330L, 243A, 243L, 264A, 264V and 299T. Such modification may be included in one or both Fc domains of the subject antibody.

[0722] In some embodiments, the subject antibody includes one or more Fc modifications that increase serum half-life. Fc substitutions that find use in increased binding to the FcRn receptor and increased serum half-life, as specifically disclosed in U.S. Ser. No. 12/341,769, hereby incorporated by reference in its entirety, including, but not limited to, 434S, 434A, 428L, 308F, 2591, 428L/434S, 2591/308F, 4361/428L, 4361 or V/434S, 436V/428L, 2591/308F/428L, and M252Y/S254T/T256E. Such modification may be included in one or both Fc domains of the subject antibody.

### 2. Ablation Variants

[0723] In some embodiments, the heterodimeric antibody includes one or more modifications that reduce or remove the normal binding of the Fc domain to one or more or all of the Fcγ receptors (e.g., FcγR1, FcγRIIa, FcγRIIb, FcγRIIIa, etc.) to avoid additional mechanisms of action. Such modifications are referred to as “FcγR ablation variants” or “Fc knock out (FcKO or KO)” variants. In these embodiments, for some therapeutic applications, it is desirable to reduce or remove the normal binding of the Fc domain to one or more or all of the Fcγ receptors (e.g., FcγR1, FcγRIIa, FcγRIIb, FcγRIIIa, etc.) to avoid additional mechanisms of action. That is, for example, in many embodiments, particularly in the use of bispecific antibodies that bind CD3 epsilon (CD3e) monovalently, it is generally desirable to ablate FcγRIIIa binding to eliminate or significantly reduce ADCC activity. In some embodiments, of the subject antibodies described herein, at least one of the Fc domains comprises one or more Fcγ receptor ablation variants. In some embodiments, of the subject antibodies described herein, both of the Fc domains comprises one or more Fcγ receptor ablation variants. These ablation variants are depicted in FIG. 14, and each can be independently and optionally included or excluded, with aspects utilizing ablation variants selected from the group consisting of: L234A/L235A/D265S, G236R/L328R, E233P/L234V/L235A/G236del/S239K, E233P/L234V/L235A/G236del/S267K, E233P/L234V/L235A/G236del/S239K/A327G, E233P/L234V/L235A/G236del/S267K/A327G and E233P/L234V/L235A/G236del. It should be noted that the ablation variants referenced herein ablate FcγR binding but generally not FcRn binding.

[0724] As is known in the art, the Fc domain of human IgG1 has the highest binding to the Fcγ receptors, and thus ablation variants can be used when the constant domain (or Fc domain) in the backbone of the heterodimeric antibody is IgG1. Alternatively, or in addition to ablation variants in an IgG1 background, mutations at the glycosylation position 297 (generally to A or S) can significantly ablate binding to FcγRIIIa, for example. Human IgG2 and IgG4 have naturally reduced binding to the Fcγ receptors, and thus those backbones can be used with or without the ablation variants.

### F. Combination of Heterodimeric and Fc Variants

[0725] As will be appreciated by those in the art, all of the recited heterodimerization variants (including skew and/or purification variants) can be optionally and independently combined in any way, as long as they retain their “strandedness” or “monomer partition”. In addition, all of these variants can be combined into any of the heterodimerization formats.

[0726] In the case of pI variants, while embodiments finding particular use are shown in the figures, other combinations can be generated, following the basic rule of altering the pI difference between two monomers to facilitate purification.

[0727] In addition, any of the heterodimerization variants (skew and purification variants), are also independently and optionally combined with Fc ablation variants, Fc variants, FcRn variants, as generally outlined herein.

[0728] Exemplary combination of variants that are included in some embodiments of the heterodimeric 1+1 Fab-scFv-Fc, and 2+1 Fab2-scFv-Fc format antibodies are included in FIG. 4. In some embodiments, the heterodimeric antibody includes a combination of variants as depicted in FIG. 17.

### G. Useful Antibody Formats

[0729] As will be appreciated by those in the art and discussed more fully below, the heterodimeric bispecific antibodies provided herein can take on a wide variety of configurations, as show, for example, in FIG. 23. As will be appreciated by those in the art, the heterodimeric formats of the antibodies described herein can have different valencies as well as be bispecific. That is, heterodimeric antibodies of the antibodies described herein can be bivalent and bispecific, wherein one target tumor antigen (e.g. CD3e) is bound by one binding domain and the other target tumor antigen (e.g. TSLPR is bound by a second binding domain. The heterodimeric antibodies can also be trivalent and bispecific, wherein the first antigen is bound by two binding domains and the second antigen by a second binding domain. In embodiments, it is preferable that the CD3e is bound only monovalently, to reduce potential side effects.

[0730] The antibodies described herein utilize anti-CD3e antigen binding domains in combination with anti-CD3e binding domains. As will be appreciated by those in the art, any collection of anti-CD3e CDRs, anti-CD3 variable light and variable heavy domains, Fabs and scFvs as depicted in any of the Figures can be used (see, e.g., FIG. 24). Similarly, any of the TSLPR binding domains can be used, whether CDRs, variable light and variable heavy domains, Fabs and scFvs as disclosed herein can be used, optionally and independently combined in any combination.

### 1. 1+1 Fab-scFv-Fc Format

[0731] One heterodimeric antibody format that finds particular use in subject anti-TSLPR x anti-CD3e antibodies provided herein is the “1+1 Fab-scFv-Fc” or “bottle opener” format as shown in FIG. 23A. The 1+1 Fab-scFv-Fc format antibody includes a first monomer that is a “regular” heavy chain (VH1-CH1-hinge-CH2-CH3), wherein VH1 is a first variable heavy domain and CH2-CH3 is a first Fc domain. The 1+1 Fab-scFv-Fc also includes a light chain that includes a first variable light domain VL1 and a constant light domain CL. The light chain interacts with the VH1-CH1 of the first monomer to form a first antigen binding domain that is a Fab. The second monomer of the antibody includes a second binding domain that is a single chain Fv (“scFv”, as defined below) and a second Fc domain. The scFv includes a second variable heavy domain (VH2) and a second variable light domain (VL2), wherein the VH2 is attached to the VL2 using an scFv linker that can be charged (see, e.g., FIG. 15). The scFv is attached to the heavy chain using a domain linker (see, e.g., FIG. 16). The two monomers are brought together by the use of amino acid variants (e.g., heterodimerization variants, discussed above) in the constant regions (e.g., the Fc domain, the CH1 domain and/or the hinge region) that promote the formation of heterodimeric antibodies as is described more fully below. This structure is sometimes referred to herein as the “bottle-opener” format, due to a rough visual similarity to a bottle-opener. In some embodiments, the 1+1 Fab-scFv-Fc format antibody is a bivalent antibody.

[0732] There are several distinct advantages to the present “1+1 Fab-scFv-Fc” format. As is known in the art, antibody analogs relying on two scFv constructs often have stability and aggregation problems, which can be alleviated in the present invention by the addition of a “regular” heavy and light chain pairing. In addition, as opposed to formats that rely on two heavy chains and two light chains, there is no issue with the incorrect pairing of heavy and light chains (e.g., heavy 1 pairing with light 2, etc.).

[0733] In some embodiments of the 1+1 Fab-scFv-Fc format antibody, one of the first or second antigen binding domain is a TSLPR binding domain and the other binding domain is a CD3 epsilon (CD3e) binding domain. In some embodiments where the 1+1 Fab-scFv-Fc, it is the scFv that binds to the CD3e, and the Fab that binds TSLPR. Exemplary anti-TSLPR x anti-CD3e bispecific antibodies in the 1+1 Fab-scFv-Fc format are depicted in FIG. 26.

[0734] In some embodiments, the first and second Fc domains of the 1+1 Fab-scFv-Fc format antibody are variant Fc domains that include heterodimerization skew variants (e.g., a set of amino acid substitutions as shown in FIGS. 12 and 18). Particularly useful heterodimerization skew variants include S364K/E357Q: L368D/K370S; L368D/K370S: S364K; L368E/K370S: S364K; T411T/E360E/Q362E: D401K; L368D/K370S: S364K/E357L; K370S: S364K/E357Q; T366S/L368A/Y407V: T366W and T366S/L368A/Y407V/Y349C: T366W/S354C (EU numbering)). In exemplary embodiments, one of the first or second variant Fc domains includes heterodimerization skew variants L368D/K370S and the other of the first or second variant Fc domains includes heterodimerization skew variants S364K/E357Q, wherein numbering is according to EU numbering. In exemplary embodiments, the first variant Fc domain includes heterodimerization skew variants L368D/K370S and the second variant Fc domain includes heterodimerization skew variants S364K/E357Q, wherein numbering is according to EU numbering.

[0735] In some embodiments, the variant Fc domains include ablation variants (including those shown in FIG. 14). In some embodiments, each of the first and second variant Fc domains include ablation variants E233P/L234V/L235A/G236/S267K, wherein numbering is according to EU numbering.

[0736] In some embodiments, the constant domain (CH1-hinge-CH2-CH3) of the first monomer includes pI variants (including those shown in FIG. 13). In exemplary embodiments, the constant domain (CH1-hinge-CH2-CH3) of the first monomer includes pI variants N208D/Q295E/N384D/Q418E/N421D, wherein numbering is according to EU numbering.

[0737] In exemplary embodiments, the 1+1 Fab-scFv-Fc format antibody includes a combination of amino acid modifications as depicted in FIG. 17. In such embodiments, the CH1-hinge-CH2-CH3 of the first monomer comprises amino acid variants L368D/K370S/N208D/Q295E/N384D/Q418E/N421D/E233P/L234V/L235A/G236del/S267K, the second Fc domain comprises amino acid variants S364K/E357Q/E233P/L234V/L235A/G236del/S267K, wherein numbering is according to EU numbering.

[0738] In some embodiments, the scFv of the 1+1 Fab-scFv-Fc format antibody provided herein includes a charged scFv linker (including those shown in FIG. 15). In some embodiments, the 1+1 Fab-scFv-Fc format antibody provided herein includes FcRn variants M428L/N434S, wherein numbering is according to EU numbering.

[0739] In exemplary embodiments 1+1 Fab-scFv-Fc format antibody, the first Fc domain includes heterodimerization skew variants L368D/K370S and the second Fc domain includes heterodimerization skew variants S364K/E357Q; each of the first and second Fc domains include ablation variants E233P/L234V/L235A/G236/S267K; and the constant domain (CH1-hinge-CH2-CH3) of the first monomer includes pI variants N208D/Q295E/N384D/Q418E/N421D, wherein numbering is according to EU numbering. In some embodiments, the scFv of the 1+1 Fab-scFv-Fc format antibody provided herein includes a (GKPGS)₄ charged scFv linker. In some embodiments, the 1+1 Fab-scFv-Fc format antibody provided herein includes FcRn variants M428L/N434S, wherein numbering is according to EU numbering. In some embodiments, the scFv of the 1+1 Fab-scFv-Fc format antibody provided herein includes a charged scFv linker (including those shown in FIG. 15).

[0740] Any suitable CD3e binding domain can be included in subject 1+1 Fab-scFv-Fc format antibody, including any of the CD3e binding domains provided herein. In some embodiments, the CD3e binding domain is one of the following CD3e binding domains or a variant thereof: [anti-CD3]_H1.30_L1.47, [anti-CD3]_H1.32_L1.47, [anti-CD3]_H1.89_L1.47, [anti-CD3]_H1.90_L1.47, [anti-CD3]_H1.33_L1.47, and [anti-CD3]_H1.31_L1.47 (FIGS. 24A-E). Additional suitable CD3e binding domains and related vhCDR1-3, vlCDR1-3, VH, and VL sequences that can be used in the subject anti-TSLPR x anti-CD3e 1+1 Fab-scFv-Fc format antibodies include those disclosed in U.S. Pat. No. 7,635,472 (see, e.g., SEQ ID NOs: 65 and 67), U.S. Pat. No. 9,975,949 (see, e.g., SEQ ID NOs: 57 and 58), U.S. Pat. No. 9,657,102 (see, e.g., SEQ ID NOs: 1250, 1266, 1282, 1298, and 1314 (VH), and SEQ ID NOs: 1258, 1274, 1290, 1306, and 1322 (VL)), U.S. Pat. No. 9,969,809 (see, e.g., SEQ ID NOs: 112 and 38), which are all incorporated by reference, particularly in pertinent parts relating to anti-CD3e antibodies, CD3e binding domains, and related vhCDR1-3, vlCDR1-3, and VH/VL sequences.

[0741] In some embodiments of the 1+1 Fab-scFv-Fc format, the CD3e binding domain has a VH and VL domain selected from the following:
[0742] (i) a VH comprising a vhCDR1, a vhCDR2, and a vhCDR3 having an amino acid sequence of a vhCDR1, a vhCDR2, and a vhCDR3, respectively, of a VH having an amino acid sequence of SEQ ID NO:333; and (ii) a VL comprising a vlCDR1, a vlCDR2, and a vlCDR3 having an amino acid sequence of a vlCDR1, a vlCDR2, and a vlCDR3, respectively, of a VL having an amino acid sequence of SEQ ID NO:337; or
[0743] (i) a VH comprising a vhCDR1, a vhCDR2, and a vhCDR3 having an amino acid sequence of a vhCDR1, a vhCDR2, and a vhCDR3, respectively, of a VH having an amino acid sequence of SEQ ID NO:344; and (ii) a VL comprising a vlCDR1, a vlCDR2, and a vlCDR3 having an amino acid sequence of a vlCDR1, a vlCDR2, and a vlCDR3, respectively, of a VL having an amino acid sequence of SEQ ID NO:348; or
[0744] (i) a VH comprising a vhCDR1, a vhCDR2, and a vhCDR3 having an amino acid sequence of a vhCDR1, a vhCDR2, and a vhCDR3, respectively, of a VH having an amino acid sequence of SEQ ID NO:355; and (ii) a VL comprising a vlCDR1, a vlCDR2, and a vlCDR3 having an amino acid sequence of a vlCDR1, a vlCDR2, and a vlCDR3, respectively, of a VL having an amino acid sequence of SEQ ID NO:359; or
[0745] (i) a VH comprising a vhCDR1, a vhCDR2, and a vhCDR3 having an amino acid sequence of a vhCDR1, a vhCDR2, and a vhCDR3, respectively, of a VH having an amino acid sequence of SEQ ID NO:366; and (ii) a VL comprising a vlCDR1, a vlCDR2, and a vlCDR3 having an amino acid sequence of a vlCDR1, a vlCDR2, and a vlCDR3, respectively, of a VL having an amino acid sequence of SEQ ID NO:370; or
[0746] (i) a VH comprising a vhCDR1, a vhCDR2, and a vhCDR3 having an amino acid sequence of a vhCDR1, a vhCDR2, and a vhCDR3, respectively, of a VH having an amino acid sequence of SEQ ID NO:377; and (ii) a VL comprising a vlCDR1, a vlCDR2, and a vlCDR3 having an amino acid sequence of a vlCDR1, a vlCDR2, and a vlCDR3, respectively, of a VL having an amino acid sequence of SEQ ID NO:381; or
[0747] (i) a VH comprising a vhCDR1, a vhCDR2, and a vhCDR3 having an amino acid sequence of a vhCDR1, a vhCDR2, and a vhCDR3, respectively, of a VH having an amino acid sequence of SEQ ID NO:388; and (ii) a VL comprising a vlCDR1, a vlCDR2, and a vlCDR3 having an amino acid sequence of a vlCDR1, a vlCDR2, and a vlCDR3, respectively, of a VL having an amino acid sequence of SEQ ID NO:392.

[0748] In some embodiments of the 1+1 Fab-scFv-Fc format, the CD3e binding domain has a VH and VL domain selected from the following:
[0749] (i) a VH having an amino acid sequence of SEQ ID NO:333 or a variant thereof; and (ii) a VL having an amino acid sequence of SEQ ID NO:337 or a variant thereof; or
[0750] (i) a VH having an amino acid sequence of SEQ ID NO:344 or a variant thereof; and (ii) a VL having an amino acid sequence of SEQ ID NO:348 or a variant thereof; or
[0751] (i) a VH having an amino acid sequence of SEQ ID NO:355 or a variant thereof; and (ii) a VL having an amino acid sequence of SEQ ID NO:359 or a variant thereof; or
[0752] (i) a VH having an amino acid sequence of SEQ ID NO:366 or a variant thereof; and (ii) a VL having an amino acid sequence of SEQ ID NO:370 or a variant thereof; or
[0753] (i) a VH having an amino acid sequence of SEQ ID NO:377 or a variant thereof; and (ii) a VL having an amino acid sequence of SEQ ID NO:381 or a variant thereof; or
[0754] (i) a VH having an amino acid sequence of SEQ ID NO:388 or a variant thereof; and (ii) a VL having an amino acid sequence of SEQ ID NO:392 or a variant thereof.

[0755] Any suitable TSLPR binding domain can be included in subject 1+1 Fab-scFv-Fc format antibody, including any of the TSLPR binding domains provided herein. In some embodiments, the TSLPR binding domain is one of the following TSLPR binding domains or a variant thereof: Clone 1B7, Clone 1C3, Clone 1A9, Clone 2E4, Clone 2H8, Clone 3E5, Clone 1A10, Clone 1B9, Clone 1D10, Clone 1F6, Clone 1G3, Clone 3D8, Clone 10C4, Clone 2A4, Clone 2B2, Clone 2D11, Clone 2E6, Clone 2F1, Clone 2F5, Clone 2H1, and Clone 2H4. Additional suitable TSLPR binding domains and related vhCDR1-3, vlCDR1-3, and VH/VL sequences that can be used in the subject anti-TSLPR x anti-CD3e 1+1 Fab-scFv-Fc format antibody include those disclosed in U.S. Pat. No. 8,475,793 (See, e.g., FIGS. 1-3, Table 2 and Table 3, and hu13H5, h70E8, and h54C11), U.S. Pat. No. 8,097,705 (see, e.g., FIG. 5), and US2012/0020988 (see, e.g., VH domains of SEQ ID NOs: 9 and 16, and VL domains of SEQ ID NOs: 11, 14, 18, and 19), which are all incorporated by reference, particularly in pertinent parts relating to anti-TSLPR antibodies, TSLPR binding domains, and related vhCDR1-3, vlCDR1-3, and VH/VL sequences.

[0756] In some embodiments of the 1+1 Fab-scFv-Fc format, the TSLPR binding domain has a VH and VL domain selected from the following:
[0757] (i) a VH comprising a vhCDR1, a vhCDR2, and a vhCDR3 having an amino acid sequence of a vhCDR1, a vhCDR2, and a vhCDR3, respectively, of a VH having an amino acid sequence of SEQ ID NO:7 or a variant thereof; and (ii) a VL comprising a vlCDR1, a vlCDR2, and a vlCDR3 having an amino acid sequence of a vlCDR1, a vlCDR2, and a vlCDR3, respectively, of a VL having an amino acid sequence of SEQ ID NO: 10 or a variant thereof; or
[0758] (i) a VH comprising a vhCDR1, a vhCDR2, and a vhCDR3 having an amino acid sequence of a vhCDR1, a vhCDR2, and a vhCDR3, respectively, of a VH having an amino acid sequence of SEQ ID NO:8 or a variant thereof; and (ii) a VL comprising a vlCDR1, a vlCDR2, and a vlCDR3 having an amino acid sequence of a vlCDR1, a vlCDR2, and a vlCDR3, respectively, of a VL having an amino acid sequence of SEQ ID NO:11 or a variant thereof; or
[0759] (i) a VH comprising a vhCDR1, a vhCDR2, and a vhCDR3 having an amino acid sequence of a vhCDR1, a vhCDR2, and a vhCDR3, respectively, of a VH having an amino acid sequence of SEQ ID NO:9 or a variant thereof; and (ii) a VL comprising a vlCDR1, a vlCDR2, and a vlCDR3 having an amino acid sequence of a vlCDR1, a vlCDR2, and a vlCDR3, respectively, of a VL having an amino acid sequence of SEQ ID NO:12 or a variant thereof; or
[0760] (i) a VH comprising a vhCDR1, a vhCDR2, and a vhCDR3 having an amino acid sequence of a vhCDR1, a vhCDR2, and a vhCDR3, respectively, of a VH having an amino acid sequence of SEQ ID NO:76 or a variant thereof; and (ii) a VL comprising a vlCDR1, a vlCDR2, and a vlCDR3 having an amino acid sequence of a vlCDR1, a vlCDR2, and a vlCDR3, respectively, of a VL having an amino acid sequence of SEQ ID NO:148 or a variant thereof; or
[0761] (i) a VH comprising a vhCDR1, a vhCDR2, and a vhCDR3 having an amino acid sequence of a vhCDR1, a vhCDR2, and a vhCDR3, respectively, of a VH having an amino acid sequence of SEQ ID NO:77 or a variant thereof; and (ii) a VL comprising a vlCDR1, a vlCDR2, and a vlCDR3 having an amino acid sequence of a vlCDR1, a vlCDR2, and a vlCDR3, respectively, of a VL having an amino acid sequence of SEQ ID NO: 149 or a variant thereof; or
[0762] (i) a VH comprising a vhCDR1, a vhCDR2, and a vhCDR3 having an amino acid sequence of a vhCDR1, a vhCDR2, and a vhCDR3, respectively, of a VH having an amino acid sequence of SEQ ID NO: 78 or a variant thereof; and (ii) a VL comprising a vlCDR1, a vlCDR2, and a vlCDR3 having an amino acid sequence of a vlCDR1, a vlCDR2, and a vlCDR3, respectively, of a VL having an amino acid sequence of SEQ ID NO: 150 or a variant thereof; or
[0763] (i) a VH comprising a vhCDR1, a vhCDR2, and a vhCDR3 having an amino acid sequence of a vhCDR1, a vhCDR2, and a vhCDR3, respectively, of a VH having an amino acid sequence of SEQ ID NO:79 or a variant thereof; and (ii) a VL comprising a vlCDR1, a vlCDR2, and a vlCDR3 having an amino acid sequence of a vlCDR1, a vlCDR2, and a vlCDR3, respectively, of a VL having an amino acid sequence of SEQ ID NO:151 or a variant thereof; or
[0764] (i) a VH comprising a vhCDR1, a vhCDR2, and a vhCDR3 having an amino acid sequence of a vhCDR1, a vhCDR2, and a vhCDR3, respectively, of a VH having an amino acid sequence of SEQ ID NO:80 or a variant thereof; and (ii) a VL comprising a vlCDR1, a vlCDR2, and a vlCDR3 having an amino acid sequence of a vlCDR1, a vlCDR2, and a vlCDR3, respectively, of a VL having an amino acid sequence of SEQ ID NO: 152 or a variant thereof; or
[0765] (i) a VH comprising a vhCDR1, a vhCDR2, and a vhCDR3 having an amino acid sequence of a vhCDR1, a vhCDR2, and a vhCDR3, respectively, of a VH having an amino acid sequence of SEQ ID NO:81 or a variant thereof; and (ii) a VL comprising a vlCDR1, a vlCDR2, and a vlCDR3 having an amino acid sequence of a vlCDR1, a vlCDR2, and a vlCDR3, respectively, of a VL having an amino acid sequence of SEQ ID NO: 153 or a variant thereof; or
[0766] (i) a VH comprising a vhCDR1, a vhCDR2, and a vhCDR3 having an amino acid sequence of a vhCDR1, a vhCDR2, and a vhCDR3, respectively, of a VH having an amino acid sequence of SEQ ID NO:82 or a variant thereof; and (ii) a VL comprising a vlCDR1, a vlCDR2, and a vlCDR3 having an amino acid sequence of a vlCDR1, a vlCDR2, and a vlCDR3, respectively, of a VL having an amino acid sequence of SEQ ID NO: 154 or a variant thereof; or
[0767] (i) a VH comprising a vhCDR1, a vhCDR2, and a vhCDR3 having an amino acid sequence of a vhCDR1, a vhCDR2, and a vhCDR3, respectively, of a VH having an amino acid sequence of SEQ ID NO:83 or a variant thereof; and (ii) a VL comprising a vlCDR1, a vlCDR2, and a vlCDR3 having an amino acid sequence of a vlCDR1, a vlCDR2, and a vlCDR3, respectively, of a VL having an amino acid sequence of SEQ ID NO: 155 or a variant thereof; or
[0768] (i) a VH comprising a vhCDR1, a vhCDR2, and a vhCDR3 having an amino acid sequence of a vhCDR1, a vhCDR2, and a vhCDR3, respectively, of a VH having an amino acid sequence of SEQ ID NO:84 or a variant thereof; and (ii) a VL comprising a vlCDR1, a vlCDR2, and a vlCDR3 having an amino acid sequence of a vlCDR1, a vlCDR2, and a vlCDR3, respectively, of a VL having an amino acid sequence of SEQ ID NO:156 or a variant thereof; or
[0769] (i) a VH comprising a vhCDR1, a vhCDR2, and a vhCDR3 having an amino acid sequence of a vhCDR1, a vhCDR2, and a vhCDR3, respectively, of a VH having an amino acid sequence of SEQ ID NO:85 or a variant thereof; and (ii) a VL comprising a vlCDR1, a vlCDR2, and a vlCDR3 having an amino acid sequence of a vlCDR1, a vlCDR2, and a vlCDR3, respectively, of a VL having an amino acid sequence of SEQ ID NO: 157 or a variant thereof; or
[0770] (i) a VH comprising a vhCDR1, a vhCDR2, and a vhCDR3 having an amino acid sequence of a vhCDR1, a vhCDR2, and a vhCDR3, respectively, of a VH having an amino acid sequence of SEQ ID NO:86 or a variant thereof; and (ii) a VL comprising a vlCDR1, a vlCDR2, and a vlCDR3 having an amino acid sequence of a vlCDR1, a vlCDR2, and a vlCDR3, respectively, of a VL having an amino acid sequence of SEQ ID NO: 158 or a variant thereof; or
[0771] (i) a VH comprising a vhCDR1, a vhCDR2, and a vhCDR3 having an amino acid sequence of a vhCDR1, a vhCDR2, and a vhCDR3, respectively, of a VH having an amino acid sequence of SEQ ID NO:87 or a variant thereof; and (ii) a VL comprising a vlCDR1, a vlCDR2, and a vlCDR3 having an amino acid sequence of a vlCDR1, a vlCDR2, and a vlCDR3, respectively, of a VL having an amino acid sequence of SEQ ID NO:159 or a variant thereof; or
[0772] (i) a VH comprising a vhCDR1, a vhCDR2, and a vhCDR3 having an amino acid sequence of a vhCDR1, a vhCDR2, and a vhCDR3, respectively, of a VH having an amino acid sequence of SEQ ID NO:88 or a variant thereof; and (ii) a VL comprising a vlCDR1, a vlCDR2, and a vlCDR3 having an amino acid sequence of a vlCDR1, a vlCDR2, and a vlCDR3, respectively, of a VL having an amino acid sequence of SEQ ID NO: 160 or a variant thereof; or
[0773] (i) a VH comprising a vhCDR1, a vhCDR2, and a vhCDR3 having an amino acid sequence of a vhCDR1, a vhCDR2, and a vhCDR3, respectively, of a VH having an amino acid sequence of SEQ ID NO:89 or a variant thereof; and (ii) a VL comprising a vlCDR1, a vlCDR2, and a vlCDR3 having an amino acid sequence of a vlCDR1, a vlCDR2, and a vlCDR3, respectively, of a VL having an amino acid sequence of SEQ ID NO:161 or a variant thereof; or
[0774] (i) a VH comprising a vhCDR1, a vhCDR2, and a vhCDR3 having an amino acid sequence of a vhCDR1, a vhCDR2, and a vhCDR3, respectively, of a VH having an amino acid sequence of SEQ ID NO:90 or a variant thereof; and (ii) a VL comprising a vlCDR1, a vlCDR2, and a vlCDR3 having an amino acid sequence of a vlCDR1, a vlCDR2, and a vlCDR3, respectively, of a VL having an amino acid sequence of SEQ ID NO:162 or a variant thereof; or
[0775] (i) a VH comprising a vhCDR1, a vhCDR2, and a vhCDR3 having an amino acid sequence of a vhCDR1, a vhCDR2, and a vhCDR3, respectively, of a VH having an amino acid sequence of SEQ ID NO:91 or a variant thereof; and (ii) a VL comprising a vlCDR1, a vlCDR2, and a vlCDR3 having an amino acid sequence of a vlCDR1, a vlCDR2, and a vlCDR3, respectively, of a VL having an amino acid sequence of SEQ ID NO:163 or a variant thereof; or
[0776] (i) a VH comprising a vhCDR1, a vhCDR2, and a vhCDR3 having an amino acid sequence of a vhCDR1, a vhCDR2, and a vhCDR3, respectively, of a VH having an amino acid sequence of SEQ ID NO:92 or a variant thereof; and (ii) a VL comprising a vlCDR1, a vlCDR2, and a vlCDR3 having an amino acid sequence of a vlCDR1, a vlCDR2, and a vlCDR3, respectively, of a VL having an amino acid sequence of SEQ ID NO:164 or a variant thereof; or
[0777] (i) a VH comprising a vhCDR1, a vhCDR2, and a vhCDR3 having an amino acid sequence of a vhCDR1, a vhCDR2, and a vhCDR3, respectively, of a VH having an amino acid sequence of SEQ ID NO:93 or a variant thereof; and (ii) a VL comprising a vlCDR1, a vlCDR2, and a vlCDR3 having an amino acid sequence of a vlCDR1, a vlCDR2, and a vlCDR3, respectively, of a VL having an amino acid sequence of SEQ ID NO: 165 or a variant thereof.

[0778] In some embodiments of the 1+1 Fab-scFv-Fc format, the TSLPR binding domain has a VH and VL domain selected from the following:
[0779] (i) a VH having an amino acid sequence of SEQ ID NO:7 or a variant thereof; and (ii) a VL having an amino acid sequence of SEQ ID NO: 10 or a variant thereof; or
[0780] (i) a VH having an amino acid sequence of SEQ ID NO:8 or a variant thereof; and (ii) a VL having an amino acid sequence of SEQ ID NO:11 or a variant thereof; or
[0781] (i) a VH having an amino acid sequence of SEQ ID NO:9 or a variant thereof; and (ii) a VL having an amino acid sequence of SEQ ID NO:12 or a variant thereof; or
[0782] (i) a VH having an amino acid sequence of SEQ ID NO:76 or a variant thereof; and (ii) a VL having an amino acid sequence of SEQ ID NO: 148 or a variant thereof; or
[0783] (i) a VH having an amino acid sequence of SEQ ID NO:77 or a variant thereof; and (ii) a VL having an amino acid sequence of SEQ ID NO: 149 or a variant thereof; or
[0784] (i) a VH having an amino acid sequence of SEQ ID NO:78 or a variant thereof; and (ii) a VL having an amino acid sequence of SEQ ID NO:150 or a variant thereof; or
[0785] (i) a VH having an amino acid sequence of SEQ ID NO:79 or a variant thereof; and (ii) a VL having an amino acid sequence of SEQ ID NO:151 or a variant thereof; or
[0786] (i) a VH having an amino acid sequence of SEQ ID NO:80 or a variant thereof; and (ii) a VL having an amino acid sequence of SEQ ID NO: 152 or a variant thereof; or
[0787] (i) a VH having an amino acid sequence of SEQ ID NO:81 or a variant thereof; and (ii) a VL having an amino acid sequence of SEQ ID NO:153 or a variant thereof; or
[0788] (i) a VH having an amino acid sequence of SEQ ID NO:82 or a variant thereof; and (ii) a VL having an amino acid sequence of SEQ ID NO:154 or a variant thereof; or
[0789] (i) a VH having an amino acid sequence of SEQ ID NO:83 or a variant thereof; and (ii) a VL having an amino acid sequence of SEQ ID NO:155 or a variant thereof; or
[0790] (i) a VH having an amino acid sequence of SEQ ID NO:84 or a variant thereof; and (ii) a VL having an amino acid sequence of SEQ ID NO: 156 or a variant thereof; or
[0791] (i) a VH having an amino acid sequence of SEQ ID NO:85 or a variant thereof; and (ii) a VL having an amino acid sequence of SEQ ID NO: 157 or a variant thereof; or
[0792] (i) a VH having an amino acid sequence of SEQ ID NO:86 or a variant thereof; and (ii) a VL having an amino acid sequence of SEQ ID NO:158 or a variant thereof; or
[0793] (i) a VH having an amino acid sequence of SEQ ID NO:87 or a variant thereof; and (ii) a VL having an amino acid sequence of SEQ ID NO: 159 or a variant thereof; or
[0794] (i) a VH having an amino acid sequence of SEQ ID NO:88 or a variant thereof, and (ii) a VL having an amino acid sequence of SEQ ID NO: 160 or a variant thereof; or
[0795] (i) a VH having an amino acid sequence of SEQ ID NO:89 or a variant thereof; and (ii) a VL having an amino acid sequence of SEQ ID NO:161 or a variant thereof; or
[0796] (i) a VH having an amino acid sequence of SEQ ID NO:90 or a variant thereof; and (ii) a VL having an amino acid sequence of SEQ ID NO: 162 or a variant thereof; or
[0797] (i) a VH having an amino acid sequence of SEQ ID NO:91 or a variant thereof; and (ii) a VL having an amino acid sequence of SEQ ID NO:163 or a variant thereof; or
[0798] (i) a VH having an amino acid sequence of SEQ ID NO:92 or a variant thereof; and (ii) a VL having an amino acid sequence of SEQ ID NO:164 or a variant thereof; or
[0799] (i) a VH having an amino acid sequence of SEQ ID NO:93 or a variant thereof; and (ii) a VL having an amino acid sequence of SEQ ID NO:165 or a variant thereof.

[0800] FIG. 19 shows some exemplary Fc domain sequences that are useful in the 1+1 Fab-scFv-Fc format antibodies. The “monomer 1” sequences depicted in FIG. 19 typically refer to the Fc domain of the “Fab-Fc heavy chain” and the “monomer 2” sequences refer to the Fc domain of the “scFv-Fc heavy chain.” In addition, FIGS. 20 and 21 provide exemplary CH1-hinge domains, CH1 domains, and hinge domains that can be included in the first or second monomer of the 1+1 Fab-scFv-Fc format. Further, FIG. 22 provides useful CL sequences that can be used with this format.

### 2. 2+1 Fab2-scFv-Fc Format

[0801] One heterodimeric antibody format that finds particular use in subject anti-TSLPR x anti-CD3e antibodies provided herein is the 2+1 Fab2-scFv-Fc format (also referred to as “central-scFv format”) shown in FIG. 23B. This antibody format includes three antigen binding domains: two Fab portions and an scFv that is inserted between the VH-CH1 and CH2-CH3 regions of one of the monomers. In some embodiments of this format, the Fab portions each bind TSLPR and the “extra” scFv domain binds CD3e. In some embodiments, the 2+1 Fab2-scFv-Fc format antibody is a trivalent antibody.

[0802] In some embodiments of the 2+1 Fab2-scFv-Fc format, a first monomer includes a standard heavy chain (i.e., VH1-CH1-hinge-CH2-CH3), wherein VH1 is a first variable heavy domain and CH2-CH3 is a first Fc domain. A second monomer includes another first variable heavy domain (VH1), a CH1 domain (and optional hinge), a second Fc domain, and an scFv that includes an scFv variable light domain (VL2), an scFv linker and a scFv variable heavy domain (VH2). The scFv is covalently attached between the C-terminus of the CH1 domain of the second monomer and the N-terminus of the second Fc domain using optional domain linkers (VH1-CH1-[optional linker]-VH2-scFv linker-VH2-[optional linker]-CH2-CH3, or the opposite orientation for the scFv, VH1-CH1-[optional linker]-VL2-scFv linker-VH2-[optional linker]-CH2-CH3). The optional linkers can be any suitable peptide linkers, including, for example, the domain linkers included in FIG. 16. This embodiment further utilizes a common light chain that includes a variable light domain (VL1) and a constant light domain (CL). The common light chain associates with the VH1-CH1 of the first and second monomers to form two identical Fabs. In some embodiments, the identical Fabs each bind TSLPR. As for many of the embodiments herein, these constructs can include skew variants, pI variants, ablation variants, additional Fc variants, etc. as desired and described herein.

[0803] In some embodiments, the first and second Fc domains of the 2+1 Fab2-scFv-Fc format antibody are variant Fc domains that include heterodimerization skew variants (e.g., a set of amino acid substitutions as shown in FIGS. 12 and 18). Particularly useful heterodimerization skew variants include S364K/E357Q: L368D/K370S; L368D/K370S: S364K; L368E/K370S: S364K; T411T/E360E/Q362E: D401K; L368D/K370S: S364K/E357L; K370S: S364K/E357Q; T366S/L368A/Y407V: T366W and T366S/L368A/Y407V/Y349C: T366W/S354C (EU numbering)). In exemplary embodiments, one of the first or second variant Fc domains includes heterodimerization skew variants L368D/K370S and the other of the first or second variant Fc domains includes heterodimerization skew variants S364K/E357Q, wherein numbering is according to EU numbering. In exemplary embodiments, the first variant Fc domain includes heterodimerization skew variants L368D/K370S and the second variant Fc domain includes heterodimerization skew variants S364K/E357Q, wherein numbering is according to EU numbering.

[0804] In some embodiments, the variant Fc domains include ablation variants (including those shown in FIG. 14). In some embodiments, each of the first and second variant Fc domains include ablation variants E233P/L234V/L235A/G236/S267K, wherein numbering is according to EU numbering.

[0805] In some embodiments, the constant domain (CH1-hinge-CH2-CH3) of the first monomer includes pI variants (including those shown in FIG. 13). In exemplary embodiments, the constant domain (CH1-hinge-CH2-CH3) of the first monomer includes pI variants N208D/Q295E/N384D/Q418E/N421D, wherein numbering is according to EU numbering.

[0806] In some embodiments, the scFv of the 2+1 Fab2-scFv-Fc format antibody provided herein includes a charged scFv linker (including those shown in FIG. 15). In some embodiments, the 2+1 Fab2-scFv-Fc format antibody provided herein includes FcRn variants M428L/N434S, wherein numbering is according to EU numbering.

[0807] In exemplary embodiments of the 2+1 Fab2-scFv-Fc format antibody, the first variant Fc domain includes heterodimerization skew variants L368D/K370S and the second variant Fc domain includes heterodimerization skew variants S364K/E357Q; each of the first and second variant Fc domains include ablation variants E233P/L234V/L235A/G236/S267K; and the constant domain (CH1-hinge-CH2-CH3) of the first monomer includes pI variants N208D/Q295E/N384D/Q418E/N421D, wherein numbering is according to EU numbering. In some embodiments, the scFv of the 2+1 Fab2-scFv-Fc format antibody provided herein includes a (GKPGS)₄ charged scFv linker. In some embodiments, the 2+1 Fab2-scFv-Fc format antibody provided herein includes FcRn variants M428L/N434S, wherein numbering is according to EU numbering.

[0808] In some embodiments, the CH1-hinge-CH2-CH3 of the first monomer comprises amino acid variants L368D/K370S/N208D/Q295E/N384D/Q418E/N421D/E233P/L234V/L235A/G236del/S267K, and the second Fc domain comprises amino acid variants S364K/E357Q/E233P/L234V/L235A/G236del/S267K, wherein numbering is according to EU numbering.

[0809] In some embodiments, the scFv of the second monomer of the 2+1 Fab2-scFv-Fc format antibody is a CD3 epsilon (CD3e) binding and the VH1 of the first and second monomer and the VL1 of the common light chain each form a binding domain that binds TSLPR. Any suitable CD3e binding domain can be included in subject 2+1 Fab2-scFv-Fc format antibody, including any of the CD3e binding domains provided herein. In some embodiments, the CD3e binding domain is one of the following CD3e binding domains or a variant thereof: [anti-CD3]_H1.30_L1.47, [anti-CD3]_H1.32_L1.47, [anti-CD3]_H1.89_L1.47, [anti-CD3]_H1.90_L1.47, [anti-CD3]_H1.33_L1.47, and [anti-CD3]_H1.31_L1.47 (FIGS. 24A-E). Additional suitable CD3e binding domains and related vhCDR1-3, vlCDR1-3, VH, and VL sequences that can be used in the subject anti-TSLPR x anti-CD3e 2+1 Fab2-scFv-Fc format antibodies include those disclosed in U.S. Pat. No. 7,635,472 (see, e.g., SEQ ID NOs: 65 and 67), U.S. Pat. No. 9,975,949 (see, e.g., SEQ ID NOs: 57 and 58), U.S. Pat. No. 9,657,102 (see, e.g., SEQ ID NOs: 1250, 1266, 1282, 1298, and 1314 (VH), and SEQ ID NOs: 1258, 1274, 1290, 1306, and 1322 (VL)), U.S. Pat. No. 9,969,809 (see, e.g., SEQ ID NOs: 112 and 38), which are all incorporated by reference, particularly in pertinent parts relating to anti-CD3e antibodies, CD3e binding domains, and related vhCDR1-3, vlCDR1-3, and VH/VL sequences.
[0810] (i) a VH comprising a vhCDR1, a vhCDR2, and a vhCDR3 having an amino acid sequence of a vhCDR1, a vhCDR2, and a vhCDR3, respectively, of a VH having an amino acid sequence of SEQ ID NO:333; and (ii) a VL comprising a vlCDR1, a vlCDR2, and a vlCDR3 having an amino acid sequence of a vlCDR1, a vlCDR2, and a vlCDR3, respectively, of a VL having an amino acid sequence of SEQ ID NO:337; or
[0811] (i) a VH comprising a vhCDR1, a vhCDR2, and a vhCDR3 having an amino acid sequence of a vhCDR1, a vhCDR2, and a vhCDR3, respectively, of a VH having an amino acid sequence of SEQ ID NO:344; and (ii) a VL comprising a vlCDR1, a vlCDR2, and a vlCDR3 having an amino acid sequence of a vlCDR1, a vlCDR2, and a vlCDR3, respectively, of a VL having an amino acid sequence of SEQ ID NO:348; or
[0812] (i) a VH comprising a vhCDR1, a vhCDR2, and a vhCDR3 having an amino acid sequence of a vhCDR1, a vhCDR2, and a vhCDR3, respectively, of a VH having an amino acid sequence of SEQ ID NO:355; and (ii) a VL comprising a vlCDR1, a vlCDR2, and a vlCDR3 having an amino acid sequence of a vlCDR1, a vlCDR2, and a vlCDR3, respectively, of a VL having an amino acid sequence of SEQ ID NO:359; or
[0813] (i) a VH comprising a vhCDR1, a vhCDR2, and a vhCDR3 having an amino acid sequence of a vhCDR1, a vhCDR2, and a vhCDR3, respectively, of a VH having an amino acid sequence of SEQ ID NO:366; and (ii) a VL comprising a vlCDR1, a vlCDR2, and a vlCDR3 having an amino acid sequence of a vlCDR1, a vlCDR2, and a vlCDR3, respectively, of a VL having an amino acid sequence of SEQ ID NO:370; or
[0814] (i) a VH comprising a vhCDR1, a vhCDR2, and a vhCDR3 having an amino acid sequence of a vhCDR1, a vhCDR2, and a vhCDR3, respectively, of a VH having an amino acid sequence of SEQ ID NO:377; and (ii) a VL comprising a vlCDR1, a vlCDR2, and a vlCDR3 having an amino acid sequence of a vlCDR1, a vlCDR2, and a vlCDR3, respectively, of a VL having an amino acid sequence of SEQ ID NO:381; or
[0815] (i) a VH comprising a vhCDR1, a vhCDR2, and a vhCDR3 having an amino acid sequence of a vhCDR1, a vhCDR2, and a vhCDR3, respectively, of a VH having an amino acid sequence of SEQ ID NO:388; and (ii) a VL comprising a vlCDR1, a vlCDR2, and a vlCDR3 having an amino acid sequence of a vlCDR1, a vlCDR2, and a vlCDR3, respectively, of a VL having an amino acid sequence of SEQ ID NO:392.

[0816] In some embodiments of the 2+1 Fab2-scFv-Fc format, the CD3e binding domain has a VH and VL domain selected from the following:
[0817] (i) a VH having an amino acid sequence of SEQ ID NO:333 or a variant thereof; and (ii) a VL having an amino acid sequence of SEQ ID NO:337 or a variant thereof; or
[0818] (i) a VH having an amino acid sequence of SEQ ID NO:344 or a variant thereof; and (ii) a VL having an amino acid sequence of SEQ ID NO:348 or a variant thereof; or
[0819] (i) a VH having an amino acid sequence of SEQ ID NO:355 or a variant thereof; and (ii) a VL having an amino acid sequence of SEQ ID NO:359 or a variant thereof; or
[0820] (i) a VH having an amino acid sequence of SEQ ID NO:366 or a variant thereof; and (ii) a VL having an amino acid sequence of SEQ ID NO:370 or a variant thereof; or
[0821] (i) a VH having an amino acid sequence of SEQ ID NO:377 or a variant thereof; and (ii) a VL having an amino acid sequence of SEQ ID NO:381 or a variant thereof; or
[0822] (i) a VH having an amino acid sequence of SEQ ID NO:388 or a variant thereof; and (ii) a VL having an amino acid sequence of SEQ ID NO:392 or a variant thereof.

[0823] In some embodiments, the VH1 of the first and second monomer and the VL1 of the common light chain of the 2+1 Fab2-scFv-Fc format antibody each form a binding domain that binds TSLPR. In some embodiments, the TSLPR binding domain is one of the following TSLPR binding domains or a variant thereof: Clone 1B7, Clone 1C3, Clone 1A9, Clone 2E4, Clone 2H8, Clone 3E5, Clone 1A10, Clone 1B9, Clone 1D10, Clone 1F6, Clone 1G3, Clone 3D8, Clone 10C4, Clone 2A4, Clone 2B2, Clone 2D11, Clone 2E6, Clone 2F1, Clone 2F5, Clone 2H1, and Clone 2H4. Additional suitable TSLPR binding domains and related vhCDR1-3, vlCDR1-3, and VH/VL sequences that can be used in the subject anti-TSLPR x anti-CD3e 2+1 Fab2-scFv-Fc format antibody include those disclosed in U.S. Pat. No. 8,475,793 (See, e.g., FIGS. 1-3, Table 2 and Table 3, and hu13H5, h70E8, and h54C11), U.S. Pat. No. 8,097,705 (see, e.g., FIG. 5), and US2012/0020988 (see, e.g., VH domains of SEQ ID NOs: 9 and 16, and VL domains of SEQ ID NOs: 11, 14, 18, and 19), which are all incorporated by reference, particularly in pertinent parts relating to anti-TSLPR antibodies, TSLPR binding domains, and related vhCDR1-3, vlCDR1-3, and VH/VL sequences.

[0824] In some embodiments of 2+1 Fab2-scFv-Fc format, the TSLPR binding domains each include a VH and VL domain selected from the following:
[0825] (i) a VH comprising a vhCDR1, a vhCDR2, and a vhCDR3 having an amino acid sequence of a vhCDR1, a vhCDR2, and a vhCDR3, respectively, of a VH having an amino acid sequence of SEQ ID NO:7 or a variant thereof; and (ii) a VL comprising a vlCDR1, a vlCDR2, and a vlCDR3 having an amino acid sequence of a vlCDR1, a vlCDR2, and a vlCDR3, respectively, of a VL having an amino acid sequence of SEQ ID NO: 10 or a variant thereof; or
[0826] (i) a VH comprising a vhCDR1, a vhCDR2, and a vhCDR3 having an amino acid sequence of a vhCDR1, a vhCDR2, and a vhCDR3, respectively, of a VH having an amino acid sequence of SEQ ID NO:8 or a variant thereof; and (ii) a VL comprising a vlCDR1, a vlCDR2, and a vlCDR3 having an amino acid sequence of a vlCDR1, a vlCDR2, and a vlCDR3, respectively, of a VL having an amino acid sequence of SEQ ID NO:11 or a variant thereof; or
[0827] (i) a VH comprising a vhCDR1, a vhCDR2, and a vhCDR3 having an amino acid sequence of a vhCDR1, a vhCDR2, and a vhCDR3, respectively, of a VH having an amino acid sequence of SEQ ID NO:9 or a variant thereof; and (ii) a VL comprising a vlCDR1, a vlCDR2, and a vlCDR3 having an amino acid sequence of a vlCDR1, a vlCDR2, and a vlCDR3, respectively, of a VL having an amino acid sequence of SEQ ID NO: 12 or a variant thereof; or
[0828] (i) a VH comprising a vhCDR1, a vhCDR2, and a vhCDR3 having an amino acid sequence of a vhCDR1, a vhCDR2, and a vhCDR3, respectively, of a VH having an amino acid sequence of SEQ ID NO:76 or a variant thereof; and (ii) a VL comprising a vlCDR1, a vlCDR2, and a vlCDR3 having an amino acid sequence of a vlCDR1, a vlCDR2, and a vlCDR3, respectively, of a VL having an amino acid sequence of SEQ ID NO: 148 or a variant thereof; or
[0829] (i) a VH comprising a vhCDR1, a vhCDR2, and a vhCDR3 having an amino acid sequence of a vhCDR1, a vhCDR2, and a vhCDR3, respectively, of a VH having an amino acid sequence of SEQ ID NO:77 or a variant thereof; and (ii) a VL comprising a vlCDR1, a vlCDR2, and a vlCDR3 having an amino acid sequence of a vlCDR1, a vlCDR2, and a vlCDR3, respectively, of a VL having an amino acid sequence of SEQ ID NO: 149 or a variant thereof; or
[0830] (i) a VH comprising a vhCDR1, a vhCDR2, and a vhCDR3 having an amino acid sequence of a vhCDR1, a vhCDR2, and a vhCDR3, respectively, of a VH having an amino acid sequence of SEQ ID NO:78 or a variant thereof; and (ii) a VL comprising a vlCDR1, a vlCDR2, and a vlCDR3 having an amino acid sequence of a vlCDR1, a vlCDR2, and a vlCDR3, respectively, of a VL having an amino acid sequence of SEQ ID NO: 150 or a variant thereof; or
[0831] (i) a VH comprising a vhCDR1, a vhCDR2, and a vhCDR3 having an amino acid sequence of a vhCDR1, a vhCDR2, and a vhCDR3, respectively, of a VH having an amino acid sequence of SEQ ID NO: 79 or a variant thereof; and (ii) a VL comprising a vlCDR1, a vlCDR2, and a vlCDR3 having an amino acid sequence of a vlCDR1, a vlCDR2, and a vlCDR3, respectively, of a VL having an amino acid sequence of SEQ ID NO:151 or a variant thereof; or
[0832] (i) a VH comprising a vhCDR1, a vhCDR2, and a vhCDR3 having an amino acid sequence of a vhCDR1, a vhCDR2, and a vhCDR3, respectively, of a VH having an amino acid sequence of SEQ ID NO:80 or a variant thereof; and (ii) a VL comprising a vlCDR1, a vlCDR2, and a vlCDR3 having an amino acid sequence of a vlCDR1, a vlCDR2, and a vlCDR3, respectively, of a VL having an amino acid sequence of SEQ ID NO: 152 or a variant thereof; or
[0833] (i) a VH comprising a vhCDR1, a vhCDR2, and a vhCDR3 having an amino acid sequence of a vhCDR1, a vhCDR2, and a vhCDR3, respectively, of a VH having an amino acid sequence of SEQ ID NO:81 or a variant thereof; and (ii) a VL comprising a vlCDR1, a vlCDR2, and a vlCDR3 having an amino acid sequence of a vlCDR1, a vlCDR2, and a vlCDR3, respectively, of a VL having an amino acid sequence of SEQ ID NO: 153 or a variant thereof; or
[0834] (i) a VH comprising a vhCDR1, a vhCDR2, and a vhCDR3 having an amino acid sequence of a vhCDR1, a vhCDR2, and a vhCDR3, respectively, of a VH having an amino acid sequence of SEQ ID NO:82 or a variant thereof; and (ii) a VL comprising a vlCDR1, a vlCDR2, and a vlCDR3 having an amino acid sequence of a vlCDR1, a vlCDR2, and a vlCDR3, respectively, of a VL having an amino acid sequence of SEQ ID NO:154 or a variant thereof; or
[0835] (i) a VH comprising a vhCDR1, a vhCDR2, and a vhCDR3 having an amino acid sequence of a vhCDR1, a vhCDR2, and a vhCDR3, respectively, of a VH having an amino acid sequence of SEQ ID NO:83 or a variant thereof; and (ii) a VL comprising a vlCDR1, a vlCDR2, and a vlCDR3 having an amino acid sequence of a vlCDR1, a vlCDR2, and a vlCDR3, respectively, of a VL having an amino acid sequence of SEQ ID NO:155 or a variant thereof; or
[0836] (i) a VH comprising a vhCDR1, a vhCDR2, and a vhCDR3 having an amino acid sequence of a vhCDR1, a vhCDR2, and a vhCDR3, respectively, of a VH having an amino acid sequence of SEQ ID NO:84 or a variant thereof; and (ii) a VL comprising a vlCDR1, a vlCDR2, and a vlCDR3 having an amino acid sequence of a vlCDR1, a vlCDR2, and a vlCDR3, respectively, of a VL having an amino acid sequence of SEQ ID NO: 156 or a variant thereof; or
[0837] (i) a VH comprising a vhCDR1, a vhCDR2, and a vhCDR3 having an amino acid sequence of a vhCDR1, a vhCDR2, and a vhCDR3, respectively, of a VH having an amino acid sequence of SEQ ID NO:85 or a variant thereof; and (ii) a VL comprising a vlCDR1, a vlCDR2, and a vlCDR3 having an amino acid sequence of a vlCDR1, a vlCDR2, and a vlCDR3, respectively, of a VL having an amino acid sequence of SEQ ID NO: 157 or a variant thereof; or
[0838] (i) a VH comprising a vhCDR1, a vhCDR2, and a vhCDR3 having an amino acid sequence of a vhCDR1, a vhCDR2, and a vhCDR3, respectively, of a VH having an amino acid sequence of SEQ ID NO:86 or a variant thereof; and (ii) a VL comprising a vlCDR1, a vlCDR2, and a vlCDR3 having an amino acid sequence of a vlCDR1, a vlCDR2, and a vlCDR3, respectively, of a VL having an amino acid sequence of SEQ ID NO: 158 or a variant thereof; or
[0839] (i) a VH comprising a vhCDR1, a vhCDR2, and a vhCDR3 having an amino acid sequence of a vhCDR1, a vhCDR2, and a vhCDR3, respectively, of a VH having an amino acid sequence of SEQ ID NO:87 or a variant thereof; and (ii) a VL comprising a vlCDR1, a vlCDR2, and a vlCDR3 having an amino acid sequence of a vlCDR1, a vlCDR2, and a vlCDR3, respectively, of a VL having an amino acid sequence of SEQ ID NO: 159 or a variant thereof; or
[0840] (i) a VH comprising a vhCDR1, a vhCDR2, and a vhCDR3 having an amino acid sequence of a vhCDR1, a vhCDR2, and a vhCDR3, respectively, of a VH having an amino acid sequence of SEQ ID NO:88 or a variant thereof; and (ii) a VL comprising a vlCDR1, a vlCDR2, and a vlCDR3 having an amino acid sequence of a vlCDR1, a vlCDR2, and a vlCDR3, respectively, of a VL having an amino acid sequence of SEQ ID NO: 160 or a variant thereof; or
[0841] (i) a VH comprising a vhCDR1, a vhCDR2, and a vhCDR3 having an amino acid sequence of a vhCDR1, a vhCDR2, and a vhCDR3, respectively, of a VH having an amino acid sequence of SEQ ID NO:89 or a variant thereof; and (ii) a VL comprising a vlCDR1, a vlCDR2, and a vlCDR3 having an amino acid sequence of a vlCDR1, a vlCDR2, and a vlCDR3, respectively, of a VL having an amino acid sequence of SEQ ID NO:161 or a variant thereof; or
[0842] (i) a VH comprising a vhCDR1, a vhCDR2, and a vhCDR3 having an amino acid sequence of a vhCDR1, a vhCDR2, and a vhCDR3, respectively, of a VH having an amino acid sequence of SEQ ID NO:90 or a variant thereof; and (ii) a VL comprising a vlCDR1, a vlCDR2, and a vlCDR3 having an amino acid sequence of a vlCDR1, a vlCDR2, and a vlCDR3, respectively, of a VL having an amino acid sequence of SEQ ID NO: 162 or a variant thereof; or
[0843] (i) a VH comprising a vhCDR1, a vhCDR2, and a vhCDR3 having an amino acid sequence of a vhCDR1, a vhCDR2, and a vhCDR3, respectively, of a VH having an amino acid sequence of SEQ ID NO:91 or a variant thereof; and (ii) a VL comprising a vlCDR1, a vlCDR2, and a vlCDR3 having an amino acid sequence of a vlCDR1, a vlCDR2, and a vlCDR3, respectively, of a VL having an amino acid sequence of SEQ ID NO: 163 or a variant thereof; or
[0844] (i) a VH comprising a vhCDR1, a vhCDR2, and a vhCDR3 having an amino acid sequence of a vhCDR1, a vhCDR2, and a vhCDR3, respectively, of a VH having an amino acid sequence of SEQ ID NO:92 or a variant thereof; and (ii) a VL comprising a vlCDR1, a vlCDR2, and a vlCDR3 having an amino acid sequence of a vlCDR1, a vlCDR2, and a vlCDR3, respectively, of a VL having an amino acid sequence of SEQ ID NO:164 or a variant thereof; or
[0845] (i) a VH comprising a vhCDR1, a vhCDR2, and a vhCDR3 having an amino acid sequence of a vhCDR1, a vhCDR2, and a vhCDR3, respectively, of a VH having an amino acid sequence of SEQ ID NO:93 or a variant thereof; and (ii) a VL comprising a vlCDR1, a vlCDR2, and a vlCDR3 having an amino acid sequence of a vlCDR1, a vlCDR2, and a vlCDR3, respectively, of a VL having an amino acid sequence of SEQ ID NO: 165 or a variant thereof.

[0846] In some embodiments of 2+1 Fab2-scFv-Fc format, the TSLPR binding domains each include a VH and VL domain selected from the following:
[0847] (i) a VH having an amino acid sequence of SEQ ID NO:7 or a variant thereof; and (ii) a VL having an amino acid sequence of SEQ ID NO: 10 or a variant thereof; or
[0848] (i) a VH having an amino acid sequence of SEQ ID NO:8 or a variant thereof; and (ii) a VL having an amino acid sequence of SEQ ID NO:11 or a variant thereof; or
[0849] (i) a VH having an amino acid sequence of SEQ ID NO:9 or a variant thereof; and (ii) a VL having an amino acid sequence of SEQ ID NO:12 or a variant thereof; or
[0850] (i) a VH having an amino acid sequence of SEQ ID NO:76 or a variant thereof; and (ii) a VL having an amino acid sequence of SEQ ID NO: 148 or a variant thereof; or
[0851] (i) a VH having an amino acid sequence of SEQ ID NO:77 or a variant thereof; and (ii) a VL having an amino acid sequence of SEQ ID NO: 149 or a variant thereof; or
[0852] (i) a VH having an amino acid sequence of SEQ ID NO:78 or a variant thereof; and (ii) a VL having an amino acid sequence of SEQ ID NO:150 or a variant thereof; or
[0853] (i) a VH having an amino acid sequence of SEQ ID NO:79 or a variant thereof; and (ii) a VL having an amino acid sequence of SEQ ID NO:151 or a variant thereof; or
[0854] (i) a VH having an amino acid sequence of SEQ ID NO:80 or a variant thereof; and (ii) a VL having an amino acid sequence of SEQ ID NO:152 or a variant thereof; or
[0855] (i) a VH having an amino acid sequence of SEQ ID NO:81 or a variant thereof; and (ii) a VL having an amino acid sequence of SEQ ID NO:153 or a variant thereof; or
[0856] (i) a VH having an amino acid sequence of SEQ ID NO:82 or a variant thereof; and (ii) a VL having an amino acid sequence of SEQ ID NO:154 or a variant thereof; or
[0857] (i) a VH having an amino acid sequence of SEQ ID NO:83 or a variant thereof; and (ii) a VL having an amino acid sequence of SEQ ID NO: 155 or a variant thereof; or
[0858] (i) a VH having an amino acid sequence of SEQ ID NO:84 or a variant thereof; and (ii) a VL having an amino acid sequence of SEQ ID NO:156 or a variant thereof; or
[0859] (i) a VH having an amino acid sequence of SEQ ID NO:85 or a variant thereof; and (ii) a VL having an amino acid sequence of SEQ ID NO: 157 or a variant thereof; or
[0860] (i) a VH having an amino acid sequence of SEQ ID NO:86 or a variant thereof; and (ii) a VL having an amino acid sequence of SEQ ID NO:158 or a variant thereof; or
[0861] (i) a VH having an amino acid sequence of SEQ ID NO:87 or a variant thereof; and (ii) a VL having an amino acid sequence of SEQ ID NO: 159 or a variant thereof; or
[0862] (i) a VH having an amino acid sequence of SEQ ID NO:88 or a variant thereof; and (ii) a VL having an amino acid sequence of SEQ ID NO: 160 or a variant thereof; or
[0863] (i) a VH having an amino acid sequence of SEQ ID NO:89 or a variant thereof; and (ii) a VL having an amino acid sequence of SEQ ID NO:161 or a variant thereof; or
[0864] (i) a VH having an amino acid sequence of SEQ ID NO:90 or a variant thereof; and (ii) a VL having an amino acid sequence of SEQ ID NO: 162 or a variant thereof; or
[0865] (i) a VH having an amino acid sequence of SEQ ID NO:91 or a variant thereof; and (ii) a VL having an amino acid sequence of SEQ ID NO: 163 or a variant thereof; or
[0866] (i) a VH having an amino acid sequence of SEQ ID NO:92 or a variant thereof; and (ii) a VL having an amino acid sequence of SEQ ID NO:164 or a variant thereof; or
[0867] (i) a VH having an amino acid sequence of SEQ ID NO:93 or a variant thereof; and (ii) a VL having an amino acid sequence of SEQ ID NO:165 or a variant thereof.

[0868] FIG. 19 shows some exemplary Fc domain sequences that are useful with the 2+1 Fab2-scFv-Fc format. The “monomer 1” sequences depicted in FIG. 11 typically refer to the Fc domain of the “Fab-Fc heavy chain” and the “monomer 2” sequences refer to the Fc domain of the “Fab-scFv-Fc heavy chain.” In addition, FIGS. 20 and 21 provide exemplary CH1-hinge domains, CH1 domains, and hinge domains that can be included in the first or second monomer of the 2+1 Fab₂-scFv-Fc format. Further, FIG. 22 provides useful CL sequences that can be used with this format. Exemplary anti-TSLPR x anti-CD3e bispecific antibodies in the 2+1 Fab₂-scFv-Fc format are depicted in FIG. 26.

### VI. Nucleic Acids

[0869] In another aspect, provided herein are nucleic acid compositions encoding the anti-TSLPR antibodies, and antigen-binding fragments thereof provided herein. A nucleic acid composition may refer to one or multiple polynucleotides.

[0870] As will be appreciated by those in the art, the nucleic acid compositions will depend on the format and scaffold of the heterodimeric protein. Thus, for example, when the format requires three amino acid sequences, such as for the 1+1 Fab-scFv-Fc or 2+1 Fab₂-scFv-Fc formats, three polynucleotides can be incorporated into one or more expression vectors for expression. In exemplary embodiments, each polynucleotide is incorporated into a different expression vector.

[0871] As is known in the art, the nucleic acids encoding the components of the binding domains and antibodies disclosed herein can be incorporated into expression vectors as is known in the art, and depending on the host cells used to produce the heterodimeric antibodies of the invention. Generally the nucleic acids are operably linked to any number of regulatory elements (promoters, origin of replication, selectable markers, ribosomal binding sites, inducers, etc.). The expression vectors can be extra-chromosomal or integrating vectors.

[0872] The polynucleotides and/or expression vectors of the invention are then transformed into any number of different types of host cells as is well known in the art, including mammalian, bacterial, yeast, insect and/or fungal cells, with mammalian cells (e.g., CHO cells), finding use in many embodiments.

[0873] In some embodiments, polynucleotides encoding each monomer are each contained within a single expression vector, generally under different or the same promoter controls. In embodiments of particular use in the present invention, each of these polynucleotides are contained on different expression vectors. As shown herein and in U.S. 62/025,931, hereby incorporated by reference, different vector ratios can be used to drive heterodimer formation. That is, surprisingly, while the proteins comprise first monomer:second monomer:light chains (in the case of many of the embodiments herein that have three polypeptides comprising the heterodimeric antibody) in a 1:1:2 ratio, these are not the ratios that give the best results.

[0874] The antibodies provided herein are made by culturing host cells comprising the expression vector(s) as is well known in the art. Once produced, traditional antibody purification steps are done, including an ion exchange chromatography step. As discussed herein, having the pIs of the two monomers differ by at least 0.5 can allow separation by ion exchange chromatography or isoelectric focusing, or other methods sensitive to isoelectric point. That is, the inclusion of pI substitutions that alter the isoelectric point (pI) of each monomer so that such that each monomer has a different pI and the heterodimer also has a distinct pI, thus facilitating isoelectric purification of the “1+1 Fab-scFv-Fc” heterodimer (e.g., anionic exchange columns, cationic exchange columns). These substitutions also aid in the determination and monitoring of any contaminating dual scFv-Fc and mAb homodimers post-purification (e.g., IEF gels, cIEF, and analytical IEX columns).

### VII. Biological and Biochemical Functionality of the Anti-TSLPR x Anti-CD3e Antibodies

[0875] Generally, the anti-TSLPR antibodies (e.g., anti-TSLPR x anti-CD3e), and antigen-binding fragments thereof described herein are administered to patients with a TSLPR-associated cancer, and efficacy is assessed, in a number of ways as described herein. Thus, while standard assays of efficacy can be run, such as cancer load, size of tumor, evaluation of presence or extent of metastasis, etc., immuno-oncology treatments can be assessed on the basis of immune status evaluations as well. This can be done in a number of ways, including both in vitro and in vivo assays.

### A. Antibody Compositions for In Vivo Administration

[0876] Embodiments of the invention relate to a pharmaceutical composition comprising any one of the anti-TSLPR x anti-CD3e antibodies described herein and a pharmaceutically acceptable carrier. Formulations of the anti-TSLPR x anti-CD3e antibodies described herein are prepared for storage by mixing an antibody having the desired degree of purity with optional pharmaceutically acceptable carriers, excipients or stabilizers (Remington's Pharmaceutical Sciences 16th edition, Osol, A. Ed. [1980]), in the form of lyophilized formulations or aqueous solutions. Acceptable carriers, excipients, or stabilizers are nontoxic to recipients at the dosages and concentrations employed, and include buffers such as phosphate, citrate, and other organic acids; antioxidants including ascorbic acid and methionine; preservatives (such as octadecyldimethylbenzyl ammonium chloride; hexamethonium chloride; benzalkonium chloride, benzethonium chloride; phenol, butyl or benzyl alcohol; alkyl parabens such as methyl or propyl paraben; catechol; resorcinol; cyclohexanol; 3-pentanol; and m-cresol); low molecular weight (less than about 10 residues) polypeptides; proteins, such as serum albumin, gelatin, or immunoglobulins; hydrophilic polymers such as polyvinylpyrrolidone; amino acids such as glycine, glutamine, asparagine, histidine, arginine, or lysine; monosaccharides, disaccharides, and other carbohydrates including glucose, mannose, or dextrins; chelating agents such as EDTA; sugars such as sucrose, mannitol, trehalose or sorbitol; salt-forming counter-ions such as sodium; metal complexes (e.g., Zn-protein complexes); and/or non-ionic surfactants such as TWEEN™ PLURONICS™ or polyethylene glycol (PEG).

### VIII. Treatments

[0877] Once made, the anti-TSLPR antibodies (e.g., anti-TSLPR x anti-CD3e), and antigen-binding fragments thereof described herein find use in a number of oncology applications. In embodiments, the composition are useful for the treatment of a TSLPR-associated cancer. In some embodiments, the TSLPR-associated cancer is leukemia. In some embodiments, the leukemia is an Acute Lymphoblastic Leukemia, a B-cell Acute Lymphoblastic Leukemia, or a Philadelphia chromosome-like B Cell Acute Lymphoblastic Leukemia. In embodiments, the cancer overexpresses TSLPR. In embodiments, the anti-TSLPR antibodies (e.g., anti-TSLPR x anti-CD3e), and antigen-binding fragments thereof disclosed herein are used to treat allergic reactions. In embodiments, the anti-TSLPR antibodies (e.g., anti-TSLPR x anti-CD3e), and antigen-binding fragments thereof disclosed herein are used to treat asthma. In embodiments, the anti-TSLPR antibodies (e.g., anti-TSLPR x anti-CD3e), and antigen-binding fragments thereof disclosed herein partially block TSLPR-ligand interactions, thereby effectively reducing TSLPR signaling in immune reactions.

### IX. Antibody Compositions for In Vivo Administration

[0878] Formulations of the antibodies used in accordance with the antibodies described herein are prepared for storage by mixing an antibody having the desired degree of purity with optional pharmaceutically acceptable carriers, excipients or stabilizers (Remington's Pharmaceutical Sciences 16th edition, Osol, A. Ed. [1980]), in the form of lyophilized formulations or aqueous solutions. Acceptable carriers, excipients, or stabilizers are nontoxic to recipients at the dosages and concentrations employed, and include buffers such as phosphate, citrate, and other organic acids; antioxidants including ascorbic acid and methionine; preservatives (such as octadecyldimethylbenzyl ammonium chloride; hexamethonium chloride; benzalkonium chloride, benzethonium chloride; phenol, butyl or benzyl alcohol; alkyl parabens such as methyl or propyl paraben; catechol; resorcinol; cyclohexanol; 3-pentanol; and m-cresol); low molecular weight (less than about 10 residues) polypeptides; proteins, such as serum albumin, gelatin, or immunoglobulins; hydrophilic polymers such as polyvinylpyrrolidone; amino acids such as glycine, glutamine, asparagine, histidine, arginine, or lysine; monosaccharides, disaccharides, and other carbohydrates including glucose, mannose, or dextrins; chelating agents such as EDTA; sugars such as sucrose, mannitol, trehalose or sorbitol; salt-forming counter-ions such as sodium; metal complexes (e.g. Zn-protein complexes); and/or non-ionic surfactants such as TWEEN™, PLURONICS™ or polyethylene glycol (PEG).

### X. Administrative Modalities

[0879] The antibodies provided herein administered to a subject, in accord with known methods, such as intravenous administration as a bolus or by continuous infusion over a period of time.

### XI. Treatment Modalities

[0880] In the methods of the invention, therapy is used to provide a positive therapeutic response with respect to a disease or condition.

[0881] By “positive therapeutic response” is intended an improvement in the disease or condition, and/or an improvement in the symptoms associated with the disease or condition. For example, a positive therapeutic response would refer to one or more of the following improvements in the disease: (1) a reduction in the number of neoplastic cells; (2) an increase in neoplastic cell death; (3) inhibition of neoplastic cell survival; (5) inhibition (i.e., slowing to some extent, preferably halting) of tumor growth; (6) an increased patient survival rate; and (7) some relief from one or more symptoms associated with the disease or condition.

[0882] Positive therapeutic responses in any given disease or condition can be determined by standardized response criteria specific to that disease or condition. Tumor response can be assessed for changes in tumor morphology (i.e., overall tumor burden, tumor size, and the like) using screening techniques such as magnetic resonance imaging (MRI) scan, x-radiographic imaging, computed tomographic (CT) scan, bone scan imaging, endoscopy, and tumor biopsy sampling including bone marrow aspiration (BMA) and counting of tumor cells in the circulation.

[0883] In addition to these positive therapeutic responses, the subject undergoing therapy may experience the beneficial effect of an improvement in the symptoms associated with the disease.

[0884] Treatment according to the present invention includes a “therapeutically effective amount” of the medicaments used. A “therapeutically effective amount” refers to an amount effective, at dosages and for periods of time necessary, to achieve a desired therapeutic result.

[0885] A therapeutically effective amount may vary according to factors such as the disease state, age, sex, and weight of the individual, and the ability of the medicaments to elicit a desired response in the individual. A therapeutically effective amount is also one in which any toxic or detrimental effects of the antibody or antibody portion are outweighed by the therapeutically beneficial effects.

[0886] A “therapeutically effective amount” for tumor therapy may also be measured by its ability to stabilize the progression of disease. The ability of a compound to inhibit cancer may be evaluated in an animal model system predictive of efficacy in human tumors.

[0887] Alternatively, this property of a composition may be evaluated by examining the ability of the compound to inhibit cell growth or to induce apoptosis by in vitro assays known to the skilled practitioner. A therapeutically effective amount of a therapeutic compound may decrease tumor size, or otherwise ameliorate symptoms in a subject. One of ordinary skill in the art would be able to determine such amounts based on such factors as the subject's size, the severity of the subject's symptoms, and the particular composition or route of administration selected.

[0888] Dosage regimens are adjusted to provide the optimum desired response (e.g., a therapeutic response). For example, a single bolus may be administered, several divided doses may be administered over time or the dose may be proportionally reduced or increased as indicated by the exigencies of the therapeutic situation. Parenteral compositions may be formulated in dosage unit form for ease of administration and uniformity of dosage. Dosage unit form as used herein refers to physically discrete units suited as unitary dosages for the subjects to be treated; each unit contains a predetermined quantity of active compound calculated to produce the desired therapeutic effect in association with the required pharmaceutical carrier.

[0889] The specification for the dosage unit forms of the present invention are dictated by and directly dependent on (a) the unique characteristics of the active compound and the particular therapeutic effect to be achieved, and (b) the limitations inherent in the art of compounding such an active compound for the treatment of sensitivity in individuals.

[0890] The efficient dosages and the dosage regimens for the bispecific antibodies used in the present invention depend on the disease or condition to be treated and may be determined by the persons skilled in the art.

### EXAMPLES

### Example 1: TSLPR Expression in Pre-all Samples

[0891] Blood samples were obtained from pre-B-ALL patients and cell surface TSLPR and CD19 was labeled with fluorescent antibodies. Expression levels were determined by flow cytometry and confirmed TSLPR and CD19 expression in all ALL patient samples (FIG. 1A-I).

### Example 2: Generation of Monospecific Human Anti-TSLPR Antibodies

[0892] Human transgenic mice from Harbour were immunized with human TSLPR protein and single B-cell cloning and expression technology in CHO cells was used to generate antibodies with specific binding activity for TSLPR. Binding affinities for the human TSLPR-binding antibodies were confirmed using SPR/BIAcore. Multiple anti-TSLPR clones were evaluated for their ability to induce activity in antibody-dependent cellular phagocytosis (ADCP) and antibody-dependent cell-mediated cytotoxicity (ADCC) assays.

[0893] For standard immunization, purified human TSLPR protein and adjuvant were injected biweekly over a course of a 6-week immunization schedule. Injections were either subcutaneous or intraperitoneal and single B cells were cloned.

[0894] For repetitive immunization at multiple sites (RIMMS), animals were repetitively immunized in short intervals at multiple sites, e.g., in proximity to axillary, brachial, superficial inguinal, and popliteal lymph nodes, and lymph nodes at the multiple sites were harvested and used to prepare hybridomas.

[0895] Binding affinities for the human TSLPR-binding antibodies were confirmed using SPR/BIAcore. Best binding antibodies were selected and their CDR sequences were cloned into human VH and VL germline variable domains. The CDR sequences and germline variable domains of VH and VL are shown in Tables 9 and 10 below.

TABLE 9
Exemplary VH CDR Sequences and Germline for
TSLPR Antibodies
TSLPR

| | VH | | | | |
|---|---|---|---|---|---|
| | Se- | | | | |
| | quence | VH | | | |
| | SEQ ID | germ- | VH | VH | VH |
| Clone | NO | line | CDR1 | CDR2 | CDR3 |
| 2E4 | 76 | IGHV3- | FTFSSYAMN | GISGSGGSTY | AKDQRITMV |
| | | 23 | SEQ ID | YADSVKG | RGVIG |
| | | | NO: 94 | SEQ ID | SEQ ID |
| | | | | NO: 95 | NO: 96 |
| 2H8 | 77 | IGHV3- | FTFSSHAMN | AISGSGGSTY | ARGHNSGWP |
| | | 23 | SEQ ID | YADSVKG | Y |
| | | | NO: 97 | SEQ ID | SEQ ID |
| | | | | NO: 98 | NO: 99 |
| 3E5 | 78 | IGHV3- | FTFSSNAMS | AIRGRGGSTY | AKDRIVVAG |
| | | 23 | SEQ ID | YADSVKG | PFDH |
| | | | NO: 100 | SEQ ID | SEQ ID |
| | | | | NO: 101 | NO: 102 |
| 1A10 | 79 | IGHV4- | GSISTYYWN | SIYYSGTTNY | ARDQGYYHG |
| | | 59 | SEQ ID | NPSLKS | SGSYFFDY |
| | | | NO: 103 | SEQ ID | SEQ ID |
| | | | | NO: 104 | NO: 105 |
| 1B9 | 80 | IGHV4- | GSIRSSNWWS | EIYHGGTTNN | ARHRYSSGL |
| | | 4 | SEQ ID | NPSLKS | DY |
| | | | NO: 106 | SEQ ID | SEQ ID |
| | | | | NO: 107 | NO: 108 |
| 1D10 | 81 | IGHV4- | GSISRYYWS | YIFYNKNTNY | ARYIAAIYT |
| | | 59 | SEQ ID | NPSLKS | DLYYFDY |
| | | | NO: 109 | SEQ ID | SEQ ID |
| | | | | NO: 110 | NO: 111 |
| 1F6 | 82 | IGHV1- | GTVSSYAIS | GITPIFGTAK | ARGGIAAAG |
| | | 69 | SEQ ID | YAQKFQG | TFDY |
| | | | NO: 112 | SEQ ID | SEQ ID |
| | | | | NO: 113 | NO: 114 |
| 1G3 | 83 | IGHV3- | FTFSSYGMH | VMWYDGRNKY | ARDRIMVRG |
| | | 33 | SEQ ID | YADSVKG | VIIPHVFDI |
| | | | NO: 115 | SEQ ID | SEQ ID |
| | | | | NO: 116 | NO: 117 |
| 3D8 | 84 | IGHV3- | FTFSSYVMH | VIWYAGNKKY | AREYSSSWH |
| | | 30 | SEQ ID | YADSVKG | YYGMDV |
| | | | NO: 118 | SEQ ID | SEQ ID |
| | | | | NO: 119 | NO: 120 |
| 10C4 | 85 | IGHV4- | GSINSNNWWS | DIYHSGSTNY | ARRRWLQHF |
| | | 4 | SEQ ID | NPSLKS | DF |
| | | | NO: 121 | SEQ ID | SEQ ID |
| | | | | NO: 122 | NO: 123 |
| 2A4 | 86 | IGHV1- | YTFTGYYMH | RFNLHSGVTN | ARERQWLVQ |
| | | 2 | SEQ ID | YAQKFQG | DYFDY |
| | | | NO: 124 | SEQ ID | SEQ I |
| | | | | NO: 125 | DNO: 126 |
| 2B2 | 87 | IGHV3- | FTFSNYGMH | FIWYDGSHRY | AKGRGGLDW |
| | | 33 | SEQ ID | YADSVKG | YFDL |
| | | | NO: 127 | SEQ ID | SEQ ID |
| | | | | NO: 128 | NO: 129 |
| 2D11 | 88 | IGHV4- | YSISSGYYWG | RIYHSGTTSY | ARNWGGNWF |
| | | 38 | SEQ ID | NPSLKR | DP |
| | | | NO: 130 | SEQ ID | SEQ ID |
| | | | | NO: 131 | NO: 132 |
| 2E6 | 89 | IGHV3- | FTFGSYVMT | TISASGGSTY | AKDKWGKGF |
| | | 23 | SEQ ID | YADSVKG | DI |
| | | | NO: 133 | SEQ ID | SEQ ID |
| | | | | NO: 134 | NO: 135 |
| 2F1 | 90 | IGHV4- | GSISRYYWS | YIFYNKNTNY | ARYIAAIYT |
| | | 59 | SEQ ID | NPSLKS | DLYYFDY |
| | | | NO: 136 | SEQ ID | SEQ ID |
| | | | | NO: 137 | NO: 138 |
| 2F5 | 91 | IGHV3- | FTFSSHPMN | SISGSGGSTY | AKGHNSGWK |
| | | 23 | SEQ ID | YADFVKG | Y |
| | | | NO: 139 | SEQ ID | SEQ ID |
| | | | | NO: 140 | NO: 141 |
| 2H1 | 92 | IGHV3- | FTFSRYGMH | AISASGGSTY | AKDKWGYAF |
| | | 23 | SEQ ID | YADSVKG | DI |
| | | | NO: 142 | SEQ ID | SEQ ID |
| | | | | NO: 143 | NO: 144 |
| 2H4 | 93 | IGHV1- | GTFNSYAIS | GITPIFGTAK | ARPGIIVAG |
| | | 69 | SEQ ID | YAQKFQG | PFDY |
| | | | NO: 145 | SEQ ID | SEQ ID |
| | | | | NO: 146 | NO: 147 |

TABLE 10
Exemplary VL CDR Sequences and Germline for
TSLPR Antibodies

| | VL | | | | |
|---|---|---|---|---|---|
| | Se- | | | | |
| | quence | VL | | | |
| | SEQ ID | germ- | VL | VL | VL |
| Clone | NO | line | CDR1 | CDR2 | CDR3 |
| 2E4 | 148 | IGKV1- | RASQSISSWLA | KASSLES | QQYVGLIT |
| | | 5 | SEQ ID | SEQ ID | SEQ ID |
| | | | NO: 166 | NO: 167 | NO: 168 |
| 2H8 | 149 | IGKV1- | RASQSISIYLN | AASSLQS | QQSYSTPLT |
| | | 39 | SEQ ID | SEQ ID | SEQ ID |
| | | | NO: 169 | NO: 170 | NO: 171 |
| 3E5 | 150 | IGKV1- | RASQGISSYLA | AASTLQS | QQLNRYPLT |
| | | 9 | SEQ ID | SEQ ID | SEQ ID |
| | | | NO: 172 | NO: 173 | NO: 174 |
| 1A10 | 151 | IGKV3- | RASQSVSSHLA | GASTRAT | QQYNNWPLT |
| | | 15 | SEQ ID | SEQ ID | SEQ ID |
| | | | NO: 175 | NO: 176 | NO: 177 |
| 1B9 | 152 | IGKV1- | RGSHSISNWLG | KASSLKS | QQYNHYST |
| | | 5 | SEQ ID | SEQ ID | SEQ ID |
| | | | NO: 178 | NO: 179 | NO: 180 |
| 1D10 | 153 | IGKV1- | RASQGISSYLA | AASTLQS | QQLNSYPLT |
| | | 9 | SEQ ID | SEQ ID | SEQ ID |
| | | | NO: 181 | NO: 182 | NO: 183 |
| 1F6 | 154 | IGKV1- | RASQSISSWLA | KASSLES | QQYNSYSWT |
| | | 5 | SEQ ID | SEQ ID | SEQ ID |
| | | | NO: 184 | NO: 185 | NO: 186 |
| 1G3 | 155 | IGKV3- | RASQSVSSNLG | GASTRAT | QEYNNWWT |
| | | 15 | SEQ ID | SEQ ID | SEQ ID |
| | | | NO: 187 | NO: 188 | NO: 189 |
| 3D8 | 156 | IGKV1- | RASQGISSYLA | AASTLQS | QQLNSYPLT |
| | | 9 | SEQ ID | SEQ ID | SEQ ID |
| | | | NO: 190 | NO: 191 | NO: 192 |
| 10C4 | 157 | IGKV1- | RASQSITNWLA | KASSLES | QQYNIYPLA |
| | | 5 | SEQ ID | SEQ ID | SEQ ID |
| | | | NO: 193 | NO: 194 | NO: 195 |
| 2A4 | 158 | IGKV1- | RASQSISNYLN | AASSLQS | QQSYSIPPT |
| | | 39 | SEQ ID | SEQ ID | SEQ ID |
| | | | NO: 196 | NO: 197 | NO: 198 |
| 2B2 | 159 | IGKV1- | RASQSISSWLA | KASSLES | LQYNSYSYT |
| | | 5 | SEQ ID | SEQ ID | SEQ ID |
| | | | NO: 199 | NO: 200 | NO: 201 |
| 2D11 | 160 | IGKV1- | RASQGISNYLA | AASTLQS | QKYNSART |
| | | 27 | SEQ ID | SEQ ID | SEQ ID |
| | | | NO: 202 | NO: 203 | NO: 204 |
| 2E6 | 161 | IGKV1- | RASQGISSYLA | AASTLQS | QQLNSYPPT |
| | | 9 | SEQ ID | SEQ ID | SEQ ID |
| | | | NO: 205 | NO: 206 | NO: 207 |
| 2F1 | 162 | IGKV1- | RASQGISSYLA | AASTLqS | QQLNSYPLT |
| | | 9 | SEQ ID | SEQ ID | SEQ ID |
| | | | NO: 208 | NO: 209 | NO: 210 |
| 2F5 | 163 | IGKV1- | RASQGISSYLA | AASTLqS | QQLNSYPPT |
| | | 9 | SEQ ID | SEQ ID | SEQ ID |
| | | | NO: 211 | NO: 212 | NO: 213 |
| 2H1 | 164 | IGKV1- | RASQSISNWLA | KASSLES | LQYNHYST |
| | | 5 | SEQ ID | SEQ ID | SEQ ID |
| | | | NO: 214 | NO: 215 | NO: 216 |
| 2H4 | 165 | IGKV1- | RASQSISSWLA | KASSLES | QQYNSYSWT |
| | | 5 | SEQ ID | SEQ ID | SEQ ID |
| | | | NO: 217 | NO: 218 | NO: 219 |

### Example 3: In Vitro Activity of Monospecific TSLPR Antibodies

### Affinity Assays

[0896] A ForteBio prefunctionalized AHQ (anti-human IgG quantitation sensor) was used to determine affinities of the anti-TSLPR antibodies disclosed in Tables 9 and 10. TSLPR antibody clones whose VH and VL sequences are disclosed in Tables 9 and 10 were bound to the AHQ sensor and his-tagged TSLPR (TSLPR-HIS) was provided in solution. For competition studies, TSLP was also added in solution. The anti-TSLPR antibodies were serially diluted with an HBS-EP solution (GE Healthcare), and 100 μL of the solution was added to the flow path at a flow rate of 50 μUmin. Binding rate constant (kon), dissociation rate constant (koff), and dissociation constant (KD) of the anti-TSLPR antibody clones were calculated using data analysis software (BIA Evaluation). ForteBio binding profiles for TSLPR clones are shown in FIGS. 10A-10U.

[0897] Table 11 provides the dissociation constants (K_{D}) and rate constants of association (kon) and dissociation (koff) for each of the TSLPR clones with VH and VL sequences provided in Tables 9 and 10.

[0898] In competition studies, TSLPR antibody bound sensors were incubated with TSLPR-HIS and TSLP in solution and blockers and partial blockers were identified.

[0899] All TSLPR clones tested demonstrated high affinity binding to TSLPR as indicated by low K_{D} values (Table 11). Furthermore, several TSLPR clones demonstrated tighter binding to TSLPR (i.e., lower K_{D} values) in the presence of TSLP indicating blocking activity towards the ligand-occupied TSLP receptor (see, e.g., clones 1A9.2, 1G3, 2A4, 2B2, 2H4 and 1C3 in Table 11).

TABLE 11
Functional Characterization of TSLPR Antibodies
TSLPR-

| | | | | Response of | TSLP |
|---|---|---|---|---|---|
| | IgG K_{D} | kon | koff | TSLPR-HIS | Response |
| Clone | (M) | (1/Ms) | (1/s) | to mAbs (nM) | (nM) |
| 2E4 | 1.01E−09 | 2.92E+05 | 2.94E−04 | 0.2399 | 0.3732 |
| 2H8 | 8.06E−10 | 2.37E+05 | 1.91E−04 | 0.3255 | 0.5008 |
| 3E5 | 6.81E−09 | 2.04E+05 | 1.39E−03 | 0.3690 | 0.5467 |
| 1A9 | 4.45E−09 | 1.73E+05 | 7.69E−04 | 0.5808 | 0.2142 |
| | | | | | Blocker |
| 1A10 | 8.90E−09 | 1.33E+05 | 1.19E−03 | 0.5579 | 0.6189 |
| 1B7 | 2.82E−09 | 2.80E+05 | 7.90E−04 | 0.4395 | 0.3331 |
| 1B9 | 2.33E−09 | 5.45E+05 | 1.27E−03 | 0.2534 | 0.3536 |
| 1D10 | <1.0E−12 | 1.62E+04 | <1.0E−07 | 0.3215 | 0.5440 |
| 1F6 | 3.90E−09 | 3.51E+05 | 1.37E−03 | 0.2499 | 0.3541 |
| 1G3 | 1.17E−08 | 1.79E+05 | 2.10E−03 | 0.4782 | 0.2135 |
| | | | | | Blocker |
| 3D8 | 1.16E−09 | 1.16E+05 | 1.34E−04 | | |
| 10C4 | 4.86E−09 | 6.88E+04 | 3.34E−04 | | |
| 2A4 | 3.07E−09 | 1.06E+05 | 3.26E−04 | | −3.7% |
| | | | | | Blocker |
| 2B2 | 8.07E−09 | 4.01E+05 | 3.24E−03 | | 21.2% |
| | | | | | Blocker |
| 2D11 | 5.29E−09 | 1.67E+05 | 8.81E−04 | | 83.2% |
| 2E6 | 7.63E−09 | 1.84E+05 | 1.40E−03 | | 82.6% |
| 2F1 | 4.33E−09 | 7.68E+04 | 3.32E−04 | | 204% |
| 2F5 | 1.28E−09 | 3.51E+05 | 4.50E−04 | | 120% |
| 2H1 | 1.29E−09 | 3.55E+06 | 4.59E−04 | | 80% |
| 2H4 | 5.91E−09 | 2.54E+05 | 1.50E−03 | | 32.2% |
| | | | | | Partial |
| | | | | | Blocker |
| 1C3 | 1.10E−09 | 2.44E+05 | 2.69E−04 | | 44% |
| | | | | | Blocker |

### ADCC Assays

[0900] Multiple anti-TSLPR clones were screened for their ability to induce activity in a Promega ADCC assay. The clones were added at the indicated concentrations to TSLPR-expressing REH cells (receptor #as high as 32,000 sites per cell) before adding reporter cells at an effector:target (E:T) ratio of 10:1 and cultured overnight. The assay was performed as recommended by the manufacturer (Promega, Madison, WI). Two antibodies, TSLPR-004 and TSLPR-006, induced strong signals at an EC₅₀ of 0.03 and 0.08 nM, respectively, indicating strong ADCC activity (FIG. 9A).

[0901] Further, a primary ADCC assay was performed using a Calcein labeling method. TSLPR-expressing REH cells were labeled with Calcein (10 μM; Sigma Aldrich, St. Louis, MO) for 30 mins at 37° C. and used as targets. The cells were washed and allowed to rest in complete RPMI medium for two hours before washing them twice and counting. Using 96 well plates, 5000 labeled REH-TSLPR cells were added per well followed by addition of TSLPR-004, TSLPR-006, 2D10, Rituximab, and Trastazumab antibodies at varying amounts and incubating for 1 hr at 4° C. Herceptin and Rituximab were used as negative controls while 2D10 clone (anti-TSLPR antibody) was used as a positive control. PBMCs were added at a effector:target ratio (E:T) of 30:1 and the plates were incubated at 37° C. for 4 hrs. Fluorescence signals in the supernatants were measured to determine cell lysis. Data showed modest killing of REH TSLPR⁺ cells by all three anti-TSLPR clones tested that induced around 20% cell death in 4 hrs at the highest dose. On the other hand, no cell killing was observed with Rituximab or Trastuzumab antibodies, suggesting specific killing of TSLPR-expressing REH cells by anti-TSLPR antibodies (FIG. 9B).

### Primary ADCP Assays

[0902] CD14⁺ and CD16⁺ monocytes were isolated from human PBMCs by negative selection using the EasySep™ Human Monocyte Enrichment Kit without CD16 Depletion (Stem Cell Technology, Vancouver, Canada), plated in X-VIVO™ 15 media (Lonza, Basel Switzerland) supplemented with 10% FBS and 25 ng/ml recombinant human M-CSF (R&D Systems, Minneapolis, MN), and allowed to differentiate for seven days in a standard tissue culture flask. The media and M-CSF were refreshed at day 4. Cells were detached non-enzymatically for use as effectors in an in vitro ADCP assay using TSLPR-expressing REH cells as targets. Target cells were labeled with 2 μM CFSE (Life Technologies, Carlsbad, CA), washed, suspended in warm RPMI containing 10% FBS, then incubated with an isotype control at 10 μg/ml or TSLPR-006 antibodies at 1 and 10 μg/ml for 20 minutes at room temperature. Differentiated monocytes were added at effector:target ratios of 1:1 or 2:1, with targets held constant at 0.2 million per well in a 48-well plate. The ADCP assay was incubated for two hours at 37° C. Afterwards, cell suspensions were harvested and washed in FACs buffer containing 2% FBS, normal goat serum, and normal rabbit serum (all from Millipore Sigma, St. Louis, MO). Subsequently, samples were FcR blocked using Fc Receptor Binding Inhibitor (Invitrogen/Thermo Fisher) for 15 minutes at 4° C. and stained with anti-huCD11b Alexa 647 for 30 minutes at 4° C. Samples were washed and prepared for readout on an LSR II Fortessa (BD Biosciences, San Jose, CA). Cells were analyzed to determine tumor cells alone (CFSE⁺, CD11b⁺), macrophages alone (CFSE⁺, CD11b⁺), and phagocytosed tumor cells (CFSE⁺, CD11b⁺). Percent phagocytosis was determined using the following equation: (phagocytosed tumor cells)/(phagocytosed tumor cells+tumor cells alone)×100%. Results showed that TSLPR-006 antibodies significantly increased target phagocytosis in all conditions tested (Monos+REH TSLPR-006 10 μg/ml and 1 μg/ml) while REH cells alone (REH only) and REH cell/monocyte mixtures with only media (Monos+REH No AB) or an unrelated human IgG1 antibody (Monos+REH huIgG1-10 μg/ml) showed only basal levels of phagocytosis (FIG. 9 C).

[0903] Previous analyses using Octet® Detection Systems for Biomolecular Interaction Analysis had suggested that clones TSLPR-004 and TSLPR-006 were capable of blocking TSLPR interaction with its ligand, at least partially. To confirm this finding at the cellular level, clone TSLPR-004 and TSLPR-006 antibodies were used to block TSLP-mediated signaling through TSLPR. TSLPR-expressing REH cell lines were coated with anti-TSLPR antibodies 004 and 006 before stimulating the cells with recombinant TSLP. Specifically, one million TSLPR-expressing REH cells were plated per well of a 48-well plate in 1 ml of serum-free RPMI medium and cultured overnight. The next day, anti-TSLPR or isotype control antibodies were added at varying concentrations for 30 minutes on ice. Afterwards, recombinant TSLP (R&D Systems, Minneapolis, MN) was added at 25 ng/ml to the relevant wells and incubated at 37° C. for 60 minutes. Subsequently, cell suspensions were collected, pelleted, and lysed in 50 μL of phosphatase-inhibitor containing lysis buffer. The lysates were quantitated using a BCA assay (Pierce/Thermo Fisher) and normalized to 1 mg/ml with 4× sample buffer containing 2-mercaptoethanol. Lysates were run in reduced format on 4-12% Bis-Tris gels (Invitrogen) at 20 μg of total protein per lane, transferred using the iBlot2 dry transfer system (Invitrogen), then blocked using 5% non-fat dry milk in Tris-buffered saline containing 0.05% Tween-20. Cell lysates were tested by Western blot using TSLPR downstream signaling components: pJak2, pStat5 and pS6R. Primary antibody incubations with anti-phospho Jak2 (Tyr1007), Stat5 (Tyr694), or S6R (Ser235/236) or total forms of the same (Cell Signaling Technology, Danvers, MA) were performed overnight at 4° C. with gentle rocking, using the manufacturer's recommended dilutions. Washes were performed with Tris-buffered saline containing 0.05% Tween-20 and anti-species appropriate HRP-conjugated secondary antibodies (Cell Signaling Technology) were added for a 60-minute incubation with gentle rocking at room temperature. Subsequent to further washes, the blots were developed using ECL Prime Western Blotting Detection Reagent (Cytiva Amersham, Marlborough, MA) for approximately 60 seconds and imaged using the c600 Imaging System (Azure Biosystems, Dublin, CA). Data showed that TSLP treatment induced phosphorylation of Jak2, Stat5 (FIG. 9 D) and pS6R (FIG. 9 E) and that the phosphorylation was inhibited by TSLPR-004 and TSLPR-006 antibodies in a dose dependent manner but not by control antibody 2D10. These data confirmed that TSLPR-004 and TSLPR-006 antibodies were capable of partially blocking the interaction of TSLP with its receptor and inhibiting TSLPR downstream signaling.

### Example 4: Generation of Bispecific TSLPR X CD3 Antibodies

[0904] Bispecific TSLPR x CD3 antibodies that contain two binding moieties, one that binds the cancer/leukemia-associated antigen TSLPR on B-ALL cells and the other that binds CD3 on T cells were generated. An IgG format was chosen for long half-life in vivo, its ready production in CMC, and its overall safety profile for use as therapeutic agent in humans. Specifically, the bispecific TSLPR x CD3 antibodies were generated in an Fab format for the TSLPR binding site and a scFv-Fc format for the CD3 binding site and were constructed as follows.

[0905] Human transgenic mice from Harbour were immunized with human TSLPR protein and single B-cell cloning and expression technology in CHO cells was used to generate antibodies with specific binding activity for TSLPR. Binding affinities for the human TSLPR-binding antibodies were determined using BIAcore and antibodies with TSLPR binding affinities with a Kd of about 2.872 nM for human TSLPR and a Kd of about 2.03 nM for cynomolgus TSLPR and partial TSLP binding blocking activity were selected for further development of bispecific antibodies (1B7 antibody). The VL and VH sequences of the anti-TSLPR moieties of the anti-human TSLPR antibodies were synthesized as gBlocks (Integrated DNA Technologies).

[0906] VL and VH sequences of an anti-CD3 epsilon domain-binding moiety of an anti-human CD3 antibody were also synthesized as gBlocks (Integrated DNA Technologies) and a (Gly₄Ser)₃ linker encoding sequence was used to fuse the VL and VH of the CD3 binding moiety by overlap extension PCR.

[0907] The TSLPR binding and CD3 binding moieties were engineered into TSLPR x CD3 bispecific antibodies using heterodimer Fc technology. The segment encoding the Fc domain, derived from human IgG1, was further modified to contain an N297A mutation to prevent glycosylation in the CH2 domain, and either glutamic acid, a serine, or an aspartic acid mutation in one CH3 domain and a glutamine, a lysine, a leucine, or an asparagine mutation in the opposing CH3 domain were introduced to allow for optimal heterodimerization.

[0908] The purity of the prepared TSLPR x CD3 antibodies was determined using Ultra Performance Liquid Chromatography (UPLC™) and a purity of 95% was detected (FIG. 2C). Mass spectrometry identified the whole bispecific TSLPR x CD3 molecule (FIG. 2D).

[0909] The sequences of the heavy and light chain variable regions of the bispecific TSLPR x CD3 antibodies generated are listed below, with CDR sequences identified above in Tables 3-8.

1B7 bispecific TSLPR binding site heavy
chain sequence:
(SEQ ID NO: 31)
QVQLQESGPGLVKPSGTLSLTCAVSGGSISSSNWWSWVRQPPGKGLE
WIGEIYHGGTTNNNPSLKSRVTISVDKSKSQFSLKLSSVTAADTAVYYCA
RHRYSNGLDYWGQGTLVTVSSASTKGPSVFPLAPSSKSTSGGTAALGCLV
KDYFPEPVTVSWNSGALTSGVHTFPAVLQSSGLYSLSSVVTVPSSSLGTQ
TYICNVNHKPSDTKVDKKV//EPKSCDKTHTCPPCPAPPVAGPSVFLFPP
KPKDTLMISRTPEVTCVVVDVKHEDPEVKFNWYVDGVEVHNAKTKPREE/
EYNSTYRVVSVLTVLHQDWLNGKEYKCKVSNKALPAPIEKTISKAKGQPR
EPQVYTLPPSREEMTKNQVSLTCDVSGFYPSDIAVEWESDGQPENNYKTT
PPVLDSDGSFFLYSKLTVDKSRWEQGDVFSCSVMHEALHNHYTQKSLSLS
PG
1B7 bispecific TSLPR binding site light
chain sequence:
(SEQ ID NO: 32)
DIQMTQSPSTLSASVGDRVTITCRASQSISNWLAWYQQKPGKAPKLLI
YKASSLESGVPSRFSGSGSGTEFTLTISSLQPDDFATYYCQQYNHYSTFG
QGTKLEIKRTVAAPSVFIFPPSDEQLKSGTASVVCLLNNFYPREAKVQWK
VDNALQSGNSQESVTEQDSKDSTYSLSSTLTLSKADYEKHKVYACEVTHQ
GLSSPVTKSFNRGEC.
Bispecific CD3 binding site scFv sequence:
(SEQ ID NO: 33)
EVQLVESGGGLVQPGGSLRLSCAASGFTFSTYAMNWVRQAPGKGLE
WVGRIRSKYNNYATYYADSVKGRFTISRDDSKNTLYLQMNSLRAEDTAVY
YCVRHGNFGDSYVSWFAYWGQGTLVTVSS/GKPGSGKPGSGKPGSGKPGS
QAVVTQEPSLTVSPGGTVTLTCGSSTGAVTTSNYANWVQQKPGKSPRGLI
GGTNKRAPGVPARFSGSLLGGKAALTISGAQPEDEADYYCALWYSNHWVF
GGGTKLTVL//EPKSSDKTHTCPPCPAPPVAGPSVFLFPPKPKDTLMISR
TPEVTCVVVDVKHEDPEVKFNWYVDGVEVHNAKTKPREEQYNSTYRVVSV
LTVLHQDWLNGKEYKCKVSNKALPAPIEKTISKAKGQPREPQVYTLPPSR
EQMTKNQVKLTCLVKGFYPSDIAVEWESNGQPENNYKTTPPVLDSDGSFF
LYSKLTVDKSRWQQGNVFSCSVMHEALHNHYTQKSLSLSPGK

[0910] Nucleic acid sequences for heavy chain variable domains are listed below.

TSLPR-4 VH DNA (1A9)
(SEQ ID NO: 34)
ATGAAACACCTGTGGTTCTTCCTCCTGCTGGTGGCAGCTCCCAGAT
GGGTCCTGCCCCAGGTGCAGCTGCAGGAGTCGGGCCCAGGACTGGTGAAG
CCTTCGGAGACCCTGTCCCTCACCTGCGCTGTCTCTGGTTACTCCATCAG
CAGTGGTTACTACTGGGGCTGGATCCGGCAGCCCCCAGGGAAGGGGCTGG
AGTGGATTGGGAGGATCTATCATAGTGGGACCACCTCCTACAACCCGTCC
CTCAAGAGACGAGTCACCATTTCAGTTGACACGTCCAAGAATCAGTTCTC
CCTGAAACTGAGCTCTGTGACCGCGACAGACACGGCCGTGTATTACTGTG
CGAGAAACTGGGGAGGGAACTGGTTCGACCCCTGGGGCCAGGGAACCCTG
GTCACCGTCTCGAGT
TSLPR-6 VH DNA (1B7)
(SEQ ID NO: 35)
ATGAAACACCTGTGGTTCTTCCTCCTCCTGGTGGCAGCTCCCAGAT
GGGTCCTGTCCCAGGTGCAGCTGCAGGAGTCGGGCCCAGGACTGGTGAAG
CCTTCGGGGACCCTGTCCCTCACCTGCGCTGTCTCTGGTGGCTCCATCAG
CAGTAGTAACTGGTGGAGTTGGGTCCGCCAGCCCCCAGGGAAGGGGCTGG
AGTGGATTGGGGAAATCTATCATGGTGGGACCACCAACAACAACCCGTCC
CTCAAGAGTCGAGTCACCATATCAGTAGACAAGTCCAAGAGCCAGTTCTC
CCTGAAACTGAGCTCTGTGACCGCCGCGGACACGGCCGTGTATTACTGTG
CGAGACACCGGTATAGTAATGGCCTTGACTACTGGGGCCAGGGAACCCTG
GTCACCGTCTCGAGT
TSLPR-21 VH DNA (1C3)
(SEQ ID NO: 36)
ATGGACTGGACCTGGAGGATCCTCTTCTTGGTGACAGCAGCCACAG
GAGCCCACTCCCAGGTGCAACTGGTGCAGTCTGGGGCTGAGGTGAAGAAG
CCTGGGGCCTCGGTGAAGGTCTCCTGCAAGGCTTCTGGATACACCTTCAG
CGGCTATTATATGCATTGGGTGCGACAGGCCCCTGGACAAGGGCTTGAGT
GGATGGGAAGGTTCAACCTTCACGGAGGTGTCGCAGACTATGCACAGAAG
TTTCAGGGCAGGGTCACCATGACCAGGGACACGTCCATCAGCACAGCCTA
CATGGAGCTGAGCAGGCTGCGATCTGACGACACGGCCGTGTATTACTGTG
TGAGAGAACGGCAGTGGCTGGTACAGGACTACTTTGACTACTGGGGCCAG
GGAACCCTGGTCACCGTCTCGAGT

[0911] Nucleic acid sequences for light chain variable domains are listed below.

TSLPR-4 VL DNA (1A9)
(SEQ ID NO: 37)
ATGGAAGCCCCAGCGCAGCTTCTCTTCCTCCTGCTACTCTGGCTCCC
AGATACCACCGGAGAAATTGTGTTGACACAGTCTCCAGCCACCCTGTCTT
TGTCTCCAGGGGAAAGAGCCACCCTCTCCTGCAGGGCCAGTCAGAGTGTT
AGCAGCTACTTAGCCTGGTACCAACAGAAACCTGGCCAGGCTCCCAGGCT
CCTCATCTATGATGCATCCAACAGGGCCACTGGCATCCCAGCCAGGTTCA
GTGGCAGTGGGTCTGGGACAGACTTCACTCTCACCATCAGCAGCCTAGAG
CCTGAAGATTTTGCAGTTTATTACTGTCAGCAGCGTAGCACCTGGCTCAC
TTTCGGCGGAGGGACCAAAGTGGATATCAAACGTACGGTGGCCGCTCCA
TSLPR-6 VL DNA (1B7)
(SEQ ID NO: 38)
ATGAGGCTGCCAGCACAGCTGCTGGGACTGCTGATGCTGTGGGTGA
GCGGCAGCTCCGGCGACATCCAGATGACCCAGTCCCCTTCTACACTGAGC
GCCTCCGTGGGCGATAGGGTGACCATCACATGCAGAGCCTCTCAGAGCAT
CTCCAACTGGCTGGCCTGGTACCAGCAGAAGCCAGGCAAGGCCCCCAAGC
TGCTGATCTATAAGGCCTCTAGCCTGGAGTCTGGCGTGCCTAGCAGGTTC
TCTGGAAGCGGATCCGGAACCGAGTTTACCCTGACAATCTCCTCTCTGCA
GCCAGACGATTTCGCCACATACTATTGCCAGCAGTACAATCACTATTCCA
CCTTTGGCCAGGGCACAAAGCTGGAGATCAAGCGTACGGTGGCCGCCCCA
TSLPR-21 VL DNA (1C3)
(SEQ ID NO: 39)
ATGGACATGAGGGTCCCCGCTCAGCTCCTGGGGCTCCTGCTACTCT
GGCTCCGAGGTGCCAGATGTGACATCCAGATGACCCAGTCTCCATCTTCC
CTGTCTGCATCTGTAGGAGACAGAGTCACCATCACTTGCCGGGCAAGTCA
GAGCATTAGCAGGTCTTTAAATTGGTATCAGCAGAAACCAGGGAAAGCCC
CTCAGCTCCTGATCTATGCTGCCTCCAGTTTGCAAAGTGGGGTCCCATCA
AGGTTCAGTGGCAGTGGATCTGGGACAGATTTCACTCTCACCATCAGCAG
TCTGGAACCTGAAGATTTTGCGACTTACCACTGTCAACAGAGTTACAGTA
TTTCGGTCACTTTCGGCGGAGGGACCAAAGTGGATATCAAACGTACGGTG
GCCGCTCCA

[0912] Amino acid sequences for heavy chain variable domains are listed below.

TSLPR-4 VH Protein (1A9)
(SEQ ID NO: 9)
QVQLQESGPGLVKPSETLSLTCAVSGYSISSGYYWGWIRQPPGKGLEW
IGRIYHSGTTSYNPSLKRRVTISVDTSKNQFSLKLSSVTATDTAVYYCAR
NWGGNWFDPWGQGTLVTVSS
TSLPR-6 VH Protein (1B7)
(SEQ ID NO: 7)
QVQLQESGPGLVKPSGTLSLTCAVSGGSISSSNWWSWVRQPPGKGLE
WIGEIYHGGTTNNNPSLKSRVTISVDKSKSQFSLKLSSVTAADTAVYYCA
RHRYSNGLDYWGQGTLVTVSS.
TSLPR-21 VH Protein (1C3)
(SEQ ID NO: 8)
QVQLVQSGAEVKKPGASVKVSCKASGYTFSGYYMHWVRQAPGQGLE
WMGRFNLHGGVADYAQKFQGRVTMTRTSISTAYMELSRLRSDDTAVYYCV
RERQWLVQDYFDYWGQGTLVTVSS

[0913] Amino acid sequences for light chain variable domains are listed below.

TSLPR-4 VL Protein (1A9)
(SEQ ID NO: 12)
EIVLTQSPATLSLSPGERATLSCRASQSVSSYLAWYQQKPGQAPRLLIY
DASNRATGIPARFSGSGSGTDFTLTISSLEPEDFAVYYCQQRSTWLTFGG
GTKVDIKRTVAAP.
TSLPR-6 VL Protein (1B7)
(SEQ ID NO: 10)
DIQMTQSPSTLSASVGDRVTITCRASQSISNWLAWYQQKPGKAPKLLI
YKASSLESGVPSRFSGSGSGTEFTLTISSLQPDDFATYYCQQYNHYSTFG
QGTKLEIKRTVAAP
TSLPR-21 VL Protein (1C3)
(SEQ ID NO: 11)
DIQMTQSPSSLSASVGDRVTITCRASQSISRSLNWYQQKPGKAPQLLIY
AASSLQSGVPSRFSGSGSGTDFTLTISSLEPEDFATYHCQQSYSISVTFG
GGTKVDIKRTVAAP

### Example 5: Characterization of Binding Activity of the Bispecific TSLPR X CD3 Antibodies

[0914] SPR analysis of bispecific TSLPR x CD3 antibodies was performed using BIAcore™ 2000 (GE Healthcare). Respective human TSLPR proteins or human CD3-Fc fusion proteins were immobilized on the surface of a sensor chip CMS using a Capture Kit and an Amine Coupling Kit (GE Healthcare). The bispecific TSLPR x CD3 antibodies obtained in Example 2 were serially diluted with an HBS-EP solution (GE Healthcare), and 100 μL of the solution was added to the flow path at a flow rate of 50 μUmin. By this measurement system, binding rate constant (kon), dissociation rate constant (k_{dis}), and dissociation constant (KD) of the TSLPR x CD3 antibodies and human TSLPR or human CD3 were calculated using data analysis software (BIA Evaluation) (FIGS. 2A and 2B). The BIAcore™ studies documented that the TSLPR x CD3 antibodies had binding functions for both, human TSLPR (FIG. 2A) and human CD3 (FIG. 2B).

### Example 6: Cytotoxicity Assays

[0915] The bispecific TSLPR x CD3 antibodies with the best cytotoxicity were selected for further characterization. Efficacy of TSLPR x CD3 bispecific antibodies to induce ALL Blast Lysis in Primary ALL Patient Samples was tested. ALL blasts were incubated with PBMC and different concentrations of monospecific TSLPR antibodies and bispecific TSLPR x CD3 antibodies. Efficient cell lysis was only observed in the presence of TSLPR x CD3 bispecific antibodies but not in the presence of TSLPR monospecific antibodies (FIG. 2E).

### Example 7: In Vivo Efficacy of TSLPR Bispecific Antibodies in Patient-Derived Xenograft (PDX)

### Animal, Dosing, and Tumor/Leukemia Cell Accumulation Measurement

[0916] The study protocol was approved by MDACC after review by the Animal Care and Use Committee of the AAALAC-certified institution. Single dose PK of anti-TSLPR x CD3 was studied in adult, female NSG (the Jackson Laboratory) mice as well as PBMC humanized NSG mice. For the PK in NSG mice, animals were randomized into treatment groups, and were ip injected with the bispecific antibody at 0.1, 0.3 and 1 mg/kg (n=5). For PK in humanized NSG mice, 1×10⁷ PBMC were iv injected into the mice 10 days prior to randomization for dosing. Blood was collected at indicated time points post injection through serial sampling and processed to plasma for bioanalytical and PK analyses. Concentrations of anti-TSLPR x CD3 in plasma samples were measured using antigen coated ECL based ELISA (MSD, MD) as described. PK analyses were performed according to standard non-compartmental analysis using WinNonlin package (v. 6.3, Pharsight, Certara Company).

[0917] NOD.Cg-Prkdcscid Il2rgtm 1Wjl/SzJ (NSG) mice (the Jackson Laboratory) were intravenously (IV) injected with 5000 U937-A2-Luc (Luciferase), 5M EM2-Luc and 1×10⁵ ML2-Luc human AML/CML cells. Luciferase-labeled patient-derived ALL blasts and PBMC were from two different donors (PBMC-296, FIG. 3 left panels, and PBMC-879, FIG. 3, right panels). Tumor/leukemia engraftment was assessed by imaging using a Xenogen Imaging System (PerkinElmer). Once the tumor/leukemia blast accumulations established, 10M PBMC per mouse were IV injected for humanization. Three to ten days after PBMC injection, mice were randomized into control and treatment groups and then either treated with control or anti-TSLPR x CD3 antibody at different doses via intraperitoneal (IP) injection weekly for three weeks.

### T Cell Dynamic, Activation, and Phenotyping

[0918] Mice were bled weekly through tail vein to monitor the CD3⁺T cell dynamic changes. Briefly, mouse blood was processed to single cell suspension and stain with Ghost dye (BV510, Tonbo Biosciences), mCD45 (Invitrogen), hCD45, hCD3, hCD4, hCD8, hCD69, hCD62L hCD45RO and hCD45RA (Biolegend). T cells state is determined by cell surface phenotypic markers: T memory stem cells (TSCM) CD45RO-CD62L⁺, Central memory T cells (TCM) CD45RO⁺CD62L⁺, effector memory T cells (TEM) CD45RO⁺CD62L⁻, terminal differentiate effector T cells (TEMRA) CD45RA⁺CD62L⁻. Data were acquired on an LSR Fortessa flow cytometer (BD Biosciences) and analyzed using FlowJo software Ver. Win64-10.6.1.

[0919] Three to ten days after PBMC injection (for humanization), mice were randomized into control and treatment groups and then either treated with control or with 1 mg/kg of TSLPR x CD3 bispecific antibody intraperitoneal (IP) once a week for three weeks. Bioluminescence imaging showed significantly less ALL cell bioluminescence signal after 21 days in mice injected with TSLPR x CD3 bispecific antibodies compared to mice injected with PBS (control) (FIG. 3).

[0920] Mice were also injected with patient-derived luciferase-labeled ALL blasts and donor PBMC (PBMC-875), treated with 0.01, 0.1, and 1 mg/kg of TSLPR x CD3 antibody and the percentage of live patient-derived ALL blasts was measured in the blood, bone marrow, and spleen of xenografted mice. Control mice were injected with PBS only or PBMC-875 cells and PBS. The percentage of ALL blasts was efficiently reduced over time in the blood of mice treated with 0.1 and 1 mg/kg of TSLPR x CD3 bispecific antibody (FIG. 4A). The percentage of ALL blasts was also reduced in the bone marrow and spleen at day 17 after treatment with 0.1 and 1 mg/kg of TSLPR x CD3 bispecific antibody (FIGS. 4B and 4C). Importantly, ALL blast growth inhibition in the bone marrow did not affect hematopoiesis and mice treated with TSLPR x CD3 bispecific antibody maintained normal hematopoiesis. T cell populations were also determined in the blood, bone marrow, and spleen of xenografted mice. Mice treated with 1 mg/kg TSLPR x CD3 bispecific antibody showed increases of blood CD3⁺ T cells from about 20% to about 70% from day 7 to day 17 after antibody treatment (FIG. 5A). CD3⁺ T cells in mice treated with 0.1 and 1 mg/kg also increased in the bone marrow (FIG. 5B) and spleen (FIG. 5C) compared to control mice injected with PBMC and PBS. These results demonstrated effective T cell expansion in human ALL xenografted mice treated with TSLPR x CD3 bispecific antibody.

### Example 8: Toxicokinetic Studies in Non-Human Primates

[0921] Female Macaca fascicularis were dosed by biweekly infusion with 0.3, 1, and 3 mg/kg of TSLPR x CD3 bispecific antibody and clinical study reports, toxicokinetics and neurological and behavioral evaluations were obtained. The serum levels of TSLPR x CD3 bispecific antibody pre-dose and 4 and 24 h after injection were determined and demonstrated that the Cₘₐₓ was substantially higher than the in vitro efficacious dose (FIG. 6). Further, a shorter half-life was observed in Non-Human Primates compared to mice, which could potentially be related to target mediated antibody clearance.

### Example 9: Cytokine Release Studies in Non-Human Primates

[0922] Cytokines were measured in the blood of Non-Human Primates treated with 0.3, 1, and 3 mg/kg of TSLPR x CD3 antibody pre-dose and 4 and 24 h after antibody injection. IFN-γ and IL-6 showed a substantial increase 4 h after injection of the highest dose (3 mg/kg) but not thereafter or after a second antibody dose (FIGS. 7A and 7B). IL-8 showed moderate increases at 1 mg/kg 4 h after first antibody dose (FIG. 7C), and IL-10 showed moderate increases at 1 mg/kg 4 h and 24 h after first antibody dose (FIG. 7D). MCP-1 showed increases at all three doses 4 h after first antibody injection and moderate increases at 0.3 and 1 mg/kg 24 h after first injection (FIG. 7E). TNF-α showed a substantial increase only at the 1 mg/kg dose 4 h after first antibody injection (FIG. 7F). Therefore, bispecific TSLPR x CD3 antibody in Non-Human Primates showed minimal or limited adverse events at 0.3 mg/kg, tolerable treatment associated toxicity at 1 mg/kg, and intolerable toxicity at 3 mg/kg. The maximum tolerated dose was determined to be ≤1 mg/kg.

### Example 10: Pharmacokinetics Studies in Mice

[0923] The study protocol was approved by MDACC after review by the Animal Care and Use Committee of the AAALAC-certified institution. Single dose PK of anti-TSLPR x anti-CD3 was studied in adult, female NSG (the Jackson Laboratory) mice as well as PBMC humanized NSG mice. For the PK in NSG mice, animals were randomized into treatment groups, and were ip. injected with the bispecific antibody at 0.1, 0.3 and 1 mg/kg (n=5). For PK in humanized NSG mice, 1×10⁷ PBMC were iv injected into the mice 10 days prior to randomization for dosing. Blood samples were collected at indicated time points post injection through serial sampling and processed to plasma for bioanalytical and PK analyses. Concentrations of anti-TSLPR x CD3 in plasma samples were measured using antigen coated ECL based ELISA (MSD, MD). PK analyses were performed according to standard non-compartmental analysis using WinNonlin package (v. 6.3, Pharsight, Certara Company).

[0924] The PK studies revealed regular IgG pharmacokinetics of bispecific TSLPR x CD3 antibody (FIG. 8).

### Example 11: Engineering Additional Anti-TSLPR X Anti-CD3 Bispecific Antibodies

[0925] The above described TSLPR x CD3 bsAb (hereon designated as XENP39597) was produced in the 1+1 Fab-scFv-Fc format (cartoon schematic depicted in FIG. 23A) that comprises a single-chain Fv (“scFv”) covalently attached to a first heterodimeric Fc domain, a heavy chain variable region (VH) covalently attached to a complementary second heterodimeric Fc domain, and a light chain (LC) transfected separately so that a Fab domain is formed with the variable heavy domain.

[0926] Another format is the 2+1 Fab₂-scFv-Fc format (cartoon schematic depicted in FIG. 23B) that comprises a VH domain covalently attached to a CH1 domain covalently attached to an scFv covalently attached to a first heterodimeric Fc domain (VH-CH1-scFv-Fc), a VH domain covalently attached to a complementary second heterodimeric Fc domain, and a LC transfected separately so that Fab domains are formed with the VH domains.

[0927] While the above described TSLPR x CD3 bsAb utilized clone 1B7 variable regions, additional TSLPR binding domains can be used including those described in Tables 9 and 10. Further, while the above described TSLPR x CD3 bsAb utilized the CD3-High [VHVL] (a.k.a. [anti-CD3]_H1.30_L1.47_scFv, sequences for which are depicted in Figure X), additional CD3 binding domains including those described in FIG. 24 can be used.

[0928] Additionally, the TSLPR x CD3 bispecific antibodies of the invention may be engineered with M428L/N434S Fc variants for increased serum half-life.

[0929] DNA encoding chains of the TSLPR x CD3 bsAbs were generated by standard gene synthesis followed by isothermal cloning (Gibson assembly) or subcloning into a pTT5 expression vector containing fusion partners (e.g. domain linkers as depicted in FIG. 16 and/or backbones as depicted in FIGS. 19-22). DNA was transfected into HEK293E cells for expression. Sequences for illustrative TSLPR x CD3 bsAbs in the 1+1 Fab-scFv-Fc format and in the 2+1 Fab₂-scFv-Fc format and having various TSLPR and CD3 binding domains are depicted in FIGS. 24, Tables 3-10 and SEQ ID NOs: 1-228 and 331-396.

### Example 12: Characterizing Additional Anti-TSLPR X Anti-CD3 Bispecific Antibodies

[0930] The additional anti-TSLPR x anti-CD3 bispecific antibodies engineered with alternative CD3 binding domains and/or in the 2+1 Fab₂-scFv-Fc format (sequences for which are depicted in FIG. 26) were characterized and compared to the above described TSLPR x CD3 bsAb in the 1+1 Fab-scFv-Fc format comprising clone 1B7 and CD3-High [VHVL] XENP39597.

[0931] First, cell binding of XENP39597, XENP39599 (2+1; CD3-High-Int #1[VLVH]), and XENP39596 (bivalent mAb) to TSLPR″ cell lines were investigated. The antibodies were incubated at the indicated concentrations with 10,000 U266B1 and SNU423 cells on ice for an hour. Samples were then washed and stained with AlexaF647-labeled anti-Fc to detect binding. Data are depicted in FIG. 27.

[0932] Next, efficacy of the additional TSLPR x CD3 bispecific antibodies to induce TSLPR⁺ cell lysis (redirected T cell cytotoxicity or RTCC) was investigated in a number of experiments. In a first set of experiments, 20K U266B1 or SNU423 cells and incubated with 200K T cells (isolated from PBMC) with various concentrations of TSLPR x CD3 bispecific antibodies at 37° C. for 48 hours (RTCC data depicted in FIG. 28). In another set of experiments, 20K U266B1, MHH-CALL-4, or MUTZ5 cells were incubated with human PBMCs (effector:target 1:1) with various with various concentrations of TSLPR x CD3 bispecific antibodies at 37° C. for 24 hours (RTCC data depicted in FIG. 29). In another experiment investigating RTCC on TSLPR™ cells having various TSLPR cell densities, Reh cells (0.4K antigen density) were transfected to express various TSLPR densities (55K, 100K, and 160K) (in comparison to MUTZ5 having 10K antigen density) and incubated with T cells isolated from human PBMCs (1:1 effector:target) at 37° C. for 48 hours (RTCC data depicted in FIG. 30). In another experiment investigating the in vitro efficacy of XENP40361 having the lower affinity CD3-High-Int #2 binding domain, 50K MUTZ5 were incubated with T cells isolated from PBMCs (1:1 effector:target ratio) at 37° C. for 48 hours (RTCC data depicted in FIG. 31). In each of these experiments, % RTCC was determined by labelling target cells with CFSE Cell Proliferation Kit (Invitrogen) and determining % of dead CFSE+ cells using Live/Dead Fixable Blue Dead Cell Stain (Invitrogen). Antigen densities were estimated by FACS using fluorescently-labeled beads as advised by the QuickCal protocol (Bangs Laboratories, Inc., Fishers, IN). 50,000 cells per well and MESF beads were combined with A647-conjugated anti-TSLPR mAb for 30 minutes at 4° C. Cells were then washed and fixed in 1% PFA. Flow cytometry was performed to determine antibody binding, and antigen density calculations were carried out using QuickCal® V.2.3. software (Bangs Laboratories, Inc., Fishers, IN). To better compare XENP39597, XENP39598, and XENP39599, RTCC EC50 on various cell lines from the various experiments are depicted in the table in FIG. 32.

[0933] All cited references are herein expressly incorporated by reference in their entirety.

[0934] Whereas particular embodiments of the invention have been described above for purposes of illustration, it will be appreciated by those skilled in the art that numerous variations of the details may be made without departing from the invention as described in the appended claims.

The application's sequence listing, which the Patent Office published only in electronic form, follows.

SEQUENCE LISTING (1034 sequences)

SEQ ID NO: 1 - protein, 10 aa, synthetic construct
  REGION 1..10: note = CD3 bispecific CDR sequence
GFTFSTYAMN

SEQ ID NO: 2 - protein, 19 aa, synthetic construct
  REGION 1..19: note = CD3 bispecific CDR sequence
RIRSKYNNYATYYADSVKG

SEQ ID NO: 3 - protein, 14 aa, synthetic construct
  REGION 1..14: note = CD3 bispecific CDR sequence
HGNFGDSYVSWFAY

SEQ ID NO: 4 - protein, 14 aa, synthetic construct
  REGION 1..14: note = CD3 bispecific CDR sequence
GSSTGAVTTSNYAN

SEQ ID NO: 5 - protein, 7 aa, synthetic construct
  REGION 1..7: note = CD3 bispecific CDR sequence
GTNKRAP

SEQ ID NO: 6 - protein, 9 aa, synthetic construct
  REGION 1..9: note = CD3 bispecific CDR sequence
ALWYSNHWV

SEQ ID NO: 7 - protein, 118 aa, synthetic construct
  REGION 1..118: note = TSLPR-6 VH Protein (1B7)
QVQLQESGPGLVKPSGTLSLTCAVSGGSISSSNWWSWVRQPPGKGLEWIGEIYHGGTTNNNPSLKSRVTISVDKSKSQFSLKLSSVTAADTAVYYCARHRYSNGLDYWGQGTLVTVSS

SEQ ID NO: 8 - protein, 120 aa, synthetic construct
  REGION 1..120: note = TSLPR-21 VH Protein (1C3)
QVQLVQSGAEVKKPGASVKVSCKASGYTFSGYYMHWVRQAPGQGLEWMGRFNLHGGVADYAQKFQGRVTMTRTSISTAYMELSRLRSDDTAVYYCVRERQWLVQDYFDYWGQGTLVTVSS

SEQ ID NO: 9 - protein, 118 aa, synthetic construct
  REGION 1..118: note = TSLPR-4 VH Protein (1A9)
QVQLQESGPGLVKPSETLSLTCAVSGYSISSGYYWGWIRQPPGKGLEWIGRIYHSGTTSYNPSLKRRVTISVDTSKNQFSLKLSSVTATDTAVYYCARNWGGNWFDPWGQGTLVTVSS

SEQ ID NO: 10 - protein, 112 aa, synthetic construct
  REGION 1..112: note = TSLPR-6 VL Protein (1B7)
DIQMTQSPSTLSASVGDRVTITCRASQSISNWLAWYQQKPGKAPKLLIYKASSLESGVPSRFSGSGSGTEFTLTISSLQPDDFATYYCQQYNHYSTFGQGTKLEIKRTVAAP

SEQ ID NO: 11 - protein, 113 aa, synthetic construct
  REGION 1..113: note = TSLPR-21 VL Protein (1C3)
DIQMTQSPSSLSASVGDRVTITCRASQSISRSLNWYQQKPGKAPQLLIYAASSLQSGVPSRFSGSGSGTDFTLTISSLEPEDFATYHCQQSYSISVTFGGGTKVDIKRTVAAP

SEQ ID NO: 12 - protein, 112 aa, synthetic construct
  REGION 1..112: note = TSLPR-4 VL Protein (1A9)
EIVLTQSPATLSLSPGERATLSCRASQSVSSYLAWYQQKPGQAPRLLIYDASNRATGIPARFSGSGSGTDFTLTISSLEPEDFAVYYCQQRSTWLTFGGGTKVDIKRTVAAP

SEQ ID NO: 13 - protein, 11 aa, synthetic construct
  REGION 1..11: note = CDR-H1 (Custom) of TSLPR-6 VH Protein (1B7)
GGSISSSNWWS

SEQ ID NO: 14 - protein, 16 aa, synthetic construct
  REGION 1..16: note = CDR-H2 (Custom) of TSLPR-6 VH Protein (1B7)
EIYHGGTTNNNPSLKS

SEQ ID NO: 15 - protein, 9 aa, synthetic construct
  REGION 1..9: note = CDR-H3 (Custom) of TSLPR-6 VH Protein (1B7)
HRYSNGLDY

SEQ ID NO: 16 - protein, 10 aa, synthetic construct
  REGION 1..10: note = CDR-H1 (Custom) of TSLPR-21 VH Protein (1C3)
GYTFSGYYMH

SEQ ID NO: 17 - protein, 16 aa, synthetic construct
  REGION 1..16: note = CDR-H2 (Custom) of TSLPR-21 VH Protein (1C3)
RFNLHGGVADYAQKFQ

SEQ ID NO: 18 - protein, 12 aa, synthetic construct
  REGION 1..12: note = CDR-H3 (Custom) of TSLPR-21 VH Protein (1C3)
ERQWLVQDYFDY

SEQ ID NO: 19 - protein, 11 aa, synthetic construct
  REGION 1..11: note = CDR-H1 (Custom) of TSLPR-4 VH Protein (1A9)
GYSISSGYYWG

SEQ ID NO: 20 - protein, 16 aa, synthetic construct
  REGION 1..16: note = CDR-H2 (Custom) of TSLPR-4 VH Protein (1A9)
RIYHSGTTSYNPSLKR

SEQ ID NO: 21 - protein, 9 aa, synthetic construct
  REGION 1..9: note = CDR-H3 (Custom) of TSLPR-4 VH Protein (1A9)
NWGGNWFDP

SEQ ID NO: 22 - protein, 11 aa, synthetic construct
  REGION 1..11: note = CDR-L1 (Custom) of TSLPR-6 VL Protein (1B7)
RASQSISNWLA

SEQ ID NO: 23 - protein, 7 aa, synthetic construct
  REGION 1..7: note = CDR-L2 (Custom) of TSLPR-6 VL Protein (1B7)
KASSLES

SEQ ID NO: 24 - protein, 8 aa, synthetic construct
  REGION 1..8: note = CDR-L3 (Custom) of TSLPR-6 VL Protein (1B7)
QQYNHYST

SEQ ID NO: 25 - protein, 11 aa, synthetic construct
  REGION 1..11: note = CDR-L1 (Custom) of TSLPR-21 VL Protein (1C3)
RASQSISRSLN

SEQ ID NO: 26 - protein, 7 aa, synthetic construct
  REGION 1..7: note = CDR-L2 (Custom) of TSLPR-21 VL Protein (1C3)
AASSLQS

SEQ ID NO: 27 - protein, 9 aa, synthetic construct
  REGION 1..9: note = CDR-L3 (Custom) of TSLPR-21 VL Protein (1C3)
QQSYSISVT

SEQ ID NO: 28 - protein, 11 aa, synthetic construct
  REGION 1..11: note = CDR-L1 (Custom) of TSLPR-4 VL Protein (1A9)
RASQSVSSYLA

SEQ ID NO: 29 - protein, 7 aa, synthetic construct
  REGION 1..7: note = CDR-L2 (Custom) of TSLPR-4 VL Protein (1A9)
DASNRAT

SEQ ID NO: 30 - protein, 8 aa, synthetic construct
  REGION 1..8: note = CDR-L3 (Custom) of TSLPR-4 VL Protein (1A9)
QQRSTWLT

SEQ ID NO: 31 - protein, 446 aa, synthetic construct
  REGION 1..446: note = 1B7 bispecific Hc
QVQLQESGPGLVKPSGTLSLTCAVSGGSISSSNWWSWVRQPPGKGLEWIGEIYHGGTTNNNPSLKSRVTISVDKSKSQFSLKLSSVTAADTAVYYCARHRYSNGLDYWGQGTLVTVSSASTKGPSVFPLAPSSKSTSGGTAALGCLVKDYFPEPVTVSWNSGALTSGVHTFPAVLQSSGLYSLSSVVTVPSSSLGTQTYICNVNHKPSDTKVDKKVEPKSCDKTHTCPPCPAPPVAGPSVFLFPPKPKDTLMISRTPEVTCVVVDVKHEDPEVKFNWYVDGVEVHNAKTKPREEEYNSTYRVVSVLTVLHQDWLNGKEYKCKVSNKALPAPIEKTISKAKGQPREPQVYTLPPSREEMTKNQVSLTCDVSGFYPSDIAVEWESDGQPENNYKTTPPVLDSDGSFFLYSKLTVDKSRWEQGDVFSCSVMHEALHNHYTQKSLSLSPG

SEQ ID NO: 32 - protein, 213 aa, synthetic construct
  REGION 1..213: note = 1B7 Lc
DIQMTQSPSTLSASVGDRVTITCRASQSISNWLAWYQQKPGKAPKLLIYKASSLESGVPSRFSGSGSGTEFTLTISSLQPDDFATYYCQQYNHYSTFGQGTKLEIKRTVAAPSVFIFPPSDEQLKSGTASVVCLLNNFYPREAKVQWKVDNALQSGNSQESVTEQDSKDSTYSLSSTLTLSKADYEKHKVYACEVTHQGLSSPVTKSFNRGEC

SEQ ID NO: 33 - protein, 485 aa, synthetic construct
  REGION 1..485: note = Bispecific CD3 binding site scFv sequence
EVQLVESGGGLVQPGGSLRLSCAASGFTFSTYAMNWVRQAPGKGLEWVGRIRSKYNNYATYYADSVKGRFTISRDDSKNTLYLQMNSLRAEDTAVYYCVRHGNFGDSYVSWFAYWGQGTLVTVSSGKPGSGKPGSGKPGSGKPGSQAVVTQEPSLTVSPGGTVTLTCGSSTGAVTTSNYANWVQQKPGKSPRGLIGGTNKRAPGVPARFSGSLLGGKAALTISGAQPEDEADYYCALWYSNHWVFGGGTKLTVLEPKSSDKTHTCPPCPAPPVAGPSVFLFPPKPKDTLMISRTPEVTCVVVDVKHEDPEVKFNWYVDGVEVHNAKTKPREEQYNSTYRVVSVLTVLHQDWLNGKEYKCKVSNKALPAPIEKTISKAKGQPREPQVYTLPPSREQMTKNQVKLTCLVKGFYPSDIAVEWESNGQPENNYKTTPPVLDSDGSFFLYSKLTVDKSRWQQGNVFSCSVMHEALHNHYTQKSLSLSPGK

SEQ ID NO: 34 - DNA, 411 bp, synthetic construct
  misc_feature 1..411: note = TSLPR-4 VH DNA (1A9)
  source 1..411: mol_type = other DNA
atgaaacacctgtggttcttcctcctgctggtggcagctcccagatgggtcctgccccaggtgcagctgcaggagtcgggcccaggactggtgaagccttcggagaccctgtccctcacctgcgctgtctctggttactccatcagcagtggttactactggggctggatccggcagcccccagggaaggggctggagtggattgggaggatctatcatagtgggaccacctcctacaacccgtccctcaagagacgagtcaccatttcagttgacacgtccaagaatcagttctccctgaaactgagctctgtgaccgcgacagacacggccgtgtattactgtgcgagaaactggggagggaactggttcgacccctggggccagggaaccctggtcaccgtctcgagt

SEQ ID NO: 35 - DNA, 411 bp, synthetic construct
  misc_feature 1..411: note = TSLPR-6 VH DNA (1B7)
  source 1..411: mol_type = other DNA
atgaaacacctgtggttcttcctcctcctggtggcagctcccagatgggtcctgtcccaggtgcagctgcaggagtcgggcccaggactggtgaagccttcggggaccctgtccctcacctgcgctgtctctggtggctccatcagcagtagtaactggtggagttgggtccgccagcccccagggaaggggctggagtggattggggaaatctatcatggtgggaccaccaacaacaacccgtccctcaagagtcgagtcaccatatcagtagacaagtccaagagccagttctccctgaaactgagctctgtgaccgccgcggacacggccgtgtattactgtgcgagacaccggtatagtaatggccttgactactggggccagggaaccctggtcaccgtctcgagt

SEQ ID NO: 36 - DNA, 420 bp, synthetic construct
  misc_feature 1..420: note = TSLPR-21 VH DNA (1C3)
  source 1..420: mol_type = other DNA
atggactggacctggaggatcctcttcttggtgacagcagccacaggagcccactcccaggtgcaactggtgcagtctggggctgaggtgaagaagcctggggcctcggtgaaggtctcctgcaaggcttctggatacaccttcagcggctattatatgcattgggtgcgacaggcccctggacaagggcttgagtggatgggaaggttcaaccttcacggaggtgtcgcagactatgcacagaagtttcagggcagggtcaccatgaccagggacacgtccatcagcacagcctacatggagctgagcaggctgcgatctgacgacacggccgtgtattactgtgtgagagaacggcagtggctggtacaggactactttgactactggggccagggaaccctggtcaccgtctcgagt

SEQ ID NO: 37 - DNA, 396 bp, synthetic construct
  misc_feature 1..396: note = TSLPR-4 VL DNA (1A9)
  source 1..396: mol_type = other DNA
atggaagccccagcgcagcttctcttcctcctgctactctggctcccagataccaccggagaaattgtgttgacacagtctccagccaccctgtctttgtctccaggggaaagagccaccctctcctgcagggccagtcagagtgttagcagctacttagcctggtaccaacagaaacctggccaggctcccaggctcctcatctatgatgcatccaacagggccactggcatcccagccaggttcagtggcagtgggtctgggacagacttcactctcaccatcagcagcctagagcctgaagattttgcagtttattactgtcagcagcgtagcacctggctcactttcggcggagggaccaaagtggatatcaaacgtacggtggccgctcca

SEQ ID NO: 38 - DNA, 396 bp, synthetic construct
  misc_feature 1..396: note = TSLPR-6 VL DNA (1B7)
  source 1..396: mol_type = other DNA
atgaggctgccagcacagctgctgggactgctgatgctgtgggtgagcggcagctccggcgacatccagatgacccagtccccttctacactgagcgcctccgtgggcgatagggtgaccatcacatgcagagcctctcagagcatctccaactggctggcctggtaccagcagaagccaggcaaggcccccaagctgctgatctataaggcctctagcctggagtctggcgtgcctagcaggttctctggaagcggatccggaaccgagtttaccctgacaatctcctctctgcagccagacgatttcgccacatactattgccagcagtacaatcactattccacctttggccagggcacaaagctggagatcaagcgtacggtggccgcccca

SEQ ID NO: 39 - DNA, 405 bp, synthetic construct
  misc_feature 1..405: note = TSLPR-21 VL DNA (1C3)
  source 1..405: mol_type = other DNA
atggacatgagggtccccgctcagctcctggggctcctgctactctggctccgaggtgccagatgtgacatccagatgacccagtctccatcttccctgtctgcatctgtaggagacagagtcaccatcacttgccgggcaagtcagagcattagcaggtctttaaattggtatcagcagaaaccagggaaagcccctcagctcctgatctatgctgcctccagtttgcaaagtggggtcccatcaaggttcagtggcagtggatctgggacagatttcactctcaccatcagcagtctggaacctgaagattttgcgacttaccactgtcaacagagttacagtatttcggtcactttcggcggagggaccaaagtggatatcaaacgtacggtggccgctcca

SEQ ID NO: 40 - protein, 10 aa, synthetic construct
  REGION 1..10: note = CDR-H1 (Paratome) of TSLPR-6 VH Protein (1B7)
GSISSSNWWS

SEQ ID NO: 41 - protein, 8 aa, synthetic construct
  REGION 1..8: note = CDR-H1 (Chothia) of TSLPR-6 VH Protein (1B7)
GGSISSSN

SEQ ID NO: 42 - protein, 13 aa, synthetic construct
  REGION 1..13: note = CDR-H2 (Paratome) of TSLPR-6 VH Protein (1B7)
WIGEIYHGGTTNN

SEQ ID NO: 43 - protein, 5 aa, synthetic construct
  REGION 1..5: note = CDR-H2 (Chothia) of TSLPR-6 VH Protein (1B7)
YHGGT

SEQ ID NO: 44 - protein, 10 aa, synthetic construct
  REGION 1..10: note = CDR-H3 (Paratome) of TSLPR-6 VH Protein (1B7)
RHRYSNGLDY

SEQ ID NO: 45 - protein, 9 aa, synthetic construct
  REGION 1..9: note = CDR-H3 (Chothia) of TSLPR-6 VH Protein (1B7)
HRYSNGLDY

SEQ ID NO: 46 - protein, 8 aa, synthetic construct
  REGION 1..8: note = CDR-L1 (Paratome) of TSLPR-6 VL Protein (1B7)
QSISNWLA

SEQ ID NO: 47 - protein, 11 aa, synthetic construct
  REGION 1..11: note = CDR-L1 (Chothia) of TSLPR-6 VL Protein (1B7)
RASQSISNWLA

SEQ ID NO: 48 - protein, 11 aa, synthetic construct
  REGION 1..11: note = CDR-L2 (Paratome) of TSLPR-6 VL Protein (1B7)
LLIYKASSLES

SEQ ID NO: 49 - protein, 7 aa, synthetic construct
  REGION 1..7: note = CDR-L2 (Chothia) of TSLPR-6 VL Protein (1B7)
KASSLES

SEQ ID NO: 50 - protein, 7 aa, synthetic construct
  REGION 1..7: note = CDR-L3 (Paratome) of TSLPR-6 VL Protein (1B7)
QQYNHYS

SEQ ID NO: 51 - protein, 8 aa, synthetic construct
  REGION 1..8: note = CDR-L3 (Chothia) of TSLPR-6 VL Protein (1B7)
QQYNHYST

SEQ ID NO: 52 - protein, 10 aa, synthetic construct
  REGION 1..10: note = CDR-H1 (Paratome) of TSLPR-4 VH Protein (1A9)
YSISSGYYWG

SEQ ID NO: 53 - protein, 8 aa, synthetic construct
  REGION 1..8: note = CDR-H1 (Chothia) of TSLPR-4 VH Protein (1A9)
GYSISSGY

SEQ ID NO: 54 - protein, 13 aa, synthetic construct
  REGION 1..13: note = CDR-H2 (Paratome) of TSLPR-4 VH Protein (1A9)
WIGRIYHSGTTSY

SEQ ID NO: 55 - protein, 5 aa, synthetic construct
  REGION 1..5: note = CDR-H2 (Chothia) of TSLPR-4 VH Protein (1A9)
YHSGT

SEQ ID NO: 56 - protein, 10 aa, synthetic construct
  REGION 1..10: note = CDR-H3 (Paratome) of TSLPR-4 VH Protein (1A9)
RNWGGNWFDP

SEQ ID NO: 57 - protein, 9 aa, synthetic construct
  REGION 1..9: note = CDR-H3 (Chothia) of TSLPR-4 VH Protein (1A9)
NWGGNWFDP

SEQ ID NO: 58 - protein, 8 aa, synthetic construct
  REGION 1..8: note = CDR-L1 (Paratome) of TSLPR-4 VL Protein (1A9)
QSVSSYLA

SEQ ID NO: 59 - protein, 11 aa, synthetic construct
  REGION 1..11: note = CDR-L1 (Chothia) of TSLPR-4 VL Protein (1A9)
RASQSVSSYLA

SEQ ID NO: 60 - protein, 11 aa, synthetic construct
  REGION 1..11: note = CDR-L2 (Paratome) of TSLPR-4 VL Protein (1A9)
LLIYDASNRAT

SEQ ID NO: 61 - protein, 7 aa, synthetic construct
  REGION 1..7: note = CDR-L2 (Chothia) of TSLPR-4 VL Protein (1A9)
DASNRAT

SEQ ID NO: 62 - protein, 7 aa, synthetic construct
  REGION 1..7: note = CDR-L3 (Paratome) of TSLPR-4 VL Protein (1A9)
QQRSTWL

SEQ ID NO: 63 - protein, 8 aa, synthetic construct
  REGION 1..8: note = CDR-L3 (Chothia) of TSLPR-4 VL Protein (1A9)
QQRSTWLT

SEQ ID NO: 64 - protein, 9 aa, synthetic construct
  REGION 1..9: note = CDR-H1 (Paratome) of TSLPR-21 VH Protein (1C3)
YTFSGYYMH

SEQ ID NO: 65 - protein, 7 aa, synthetic construct
  REGION 1..7: note = CDR-H1 (Chothia) of TSLPR-21 VH Protein (1C3)
GYTFSGY

SEQ ID NO: 66 - protein, 15 aa, synthetic construct
  REGION 1..15: note = CDR-H2 (Paratome) of TSLPR-21 VH Protein (1C3)
WMGRFNLHGGVADYA

SEQ ID NO: 67 - protein, 6 aa, synthetic construct
  REGION 1..6: note = CDR-H2 (Chothia) of TSLPR-21 VH Protein (1C3)
NLHGGV

SEQ ID NO: 68 - protein, 14 aa, synthetic construct
  REGION 1..14: note = CDR-H3 (Paratome) of TSLPR-21 VH Protein (1C3)
VRERQWLVQDYFDY

SEQ ID NO: 69 - protein, 12 aa, synthetic construct
  REGION 1..12: note = CDR-H3 (Chothia) of TSLPR-21 VH Protein (1C3)
ERQWLVQDYFDY

SEQ ID NO: 70 - protein, 8 aa, synthetic construct
  REGION 1..8: note = CDR-L1 (Paratome) of TSLPR-21 VL Protein (1C3)
QSISRSLN

SEQ ID NO: 71 - protein, 11 aa, synthetic construct
  REGION 1..11: note = CDR-L1 (Chothia) of TSLPR-21 VL Protein (1C3)
RASQSISRSLN

SEQ ID NO: 72 - protein, 11 aa, synthetic construct
  REGION 1..11: note = CDR-L2 (Paratome) of TSLPR-21 VL Protein (1C3)
LLIYAASSLQS

SEQ ID NO: 73 - protein, 7 aa, synthetic construct
  REGION 1..7: note = CDR-L2 (Chothia) of TSLPR-21 VL Protein (1C3)
AASSLQS

SEQ ID NO: 74 - protein, 8 aa, synthetic construct
  REGION 1..8: note = CDR-L3 (Paratome) of TSLPR-21 VL Protein (1C3)
QQSYSISV

SEQ ID NO: 75 - protein, 9 aa, synthetic construct
  REGION 1..9: note = CDR-L3 (Chothia) of TSLPR-21 VL Protein (1C3)
QQSYSISVT

SEQ ID NO: 76 - protein, 125 aa, synthetic construct
  REGION 1..125: note = VH Protein Sequence
EVQLLESGGGLVQPGGSLRLSCAASGFTFSSYAMNWVRQAPGKGLEWVSGISGSGGSTYYADSVKGRFTFSRDNSKNTLYLQMISLRAEDTAVYYCAKDQRITMVRGVIGAFDIWGQGTMVTVSS

SEQ ID NO: 77 - protein, 117 aa, synthetic construct
  REGION 1..117: note = VH Protein Sequence
EVQLLESGGGLEQPGGSLRLSCAASGFTFSSHAMNWVRQAPGKGLEWVSAISGSGGSTYYADSVKGRFTISRDNSKNTLCLQMNSLRAEDTAVYYCARGHNSGWPYWGQGTLVTVSS

SEQ ID NO: 78 - protein, 120 aa, synthetic construct
  REGION 1..120: note = VH Protein Sequence
EVQLLESGGGLVQPGGSLRLSCAASGFTFSSNAMSWVRQAPGKGLEWVSAIRGRGGSTYYADSVKGRFTISRDNSKNTLYLQLNSLRAEDTAVYYCAKDRIVVAGPFDHWGQGTLVTVSS

SEQ ID NO: 79 - protein, 123 aa, synthetic construct
  REGION 1..123: note = VH Protein Sequence
QVQLQESGPGLVKPSETLSLTCNVSGGSISTYYWNWLRQPPGKGLEWIGSIYYSGTTNYNPSLKSRVTISVDTSKHQFSLRLTSVTAADTAVYFCARDQGYYHGSGSYFFDYWGQGTLVTVSS

SEQ ID NO: 80 - protein, 118 aa, synthetic construct
  REGION 1..118: note = VH Protein Sequence
QVQLQESGPGLVKPSGTLSLTCAVSGGSIRSSNWWSWVRQPPGKGLEWIGEIYHGGTTNNNPSLKSRVTISVDQSKSQFSLKLSSVTAADTAVYYCARHRYSSGLDYWGQGTLVTVSS

SEQ ID NO: 81 - protein, 122 aa, synthetic construct
  REGION 1..122: note = VH Protein Sequence
QVQLQESGPGLVKPSETLSLTCTVSGGSISRYYWSWIRQPPGKGLEWIGYIFYNKNTNYNPSLKSRVTISVDTSKNQFSLKLSSVTAADTAVYYCARYIAAIYTDLYYFDYWGQGTLVTVSS

SEQ ID NO: 82 - protein, 120 aa, synthetic construct
  REGION 1..120: note = VH Protein Sequence
QVQLVQSGAEVRKPGSSVKVSCKASGGTVSSYAISWVRQAPGQGLEWMGGITPIFGTAKYAQKFQGRVTITADKSTSTAYMELSSLRSEDTAVYYCARGGIAAAGTFDYWGQGTLVTVSS

SEQ ID NO: 83 - protein, 125 aa, synthetic construct
  REGION 1..125: note = VH Protein Sequence
QVQLVESGGGVVQPGRSLRLSCAASGFTFSSYGMHWVRQTPGKGLEWVAVMWYDGRNKYYADSVKGRFTISRDNSKNTLYLQMNSLRAEDTAVYYCARDRIMVRGVIIPHVFDIWGQGTMVTVSS

SEQ ID NO: 84 - protein, 122 aa, synthetic construct
  REGION 1..122: note = VH Protein Sequence
QVQLVESGGGVVQPGRSLRLSCAASGFTFSSYVMHWVRQAPGKGLEWVAVIWYAGNKKYYADSVKGRFTISRDNSNNTLYLQMNSLRAEDTAVYYCAREYSSSWHYYGMDVWGQGTTVTVSS

SEQ ID NO: 85 - protein, 118 aa, synthetic construct
  REGION 1..118: note = VH Protein Sequence
QVQLQESGPGLVKPSGTLSLTCAVSGGSINSNNWWSWVRQPPGKGLEWIGDIYHSGSTNYNPSLKSRVTISVDKSKSQFSLKLSSVTAADTAVYYCARRRWLQHFDFWGQGTLVTVSS

SEQ ID NO: 86 - protein, 121 aa, synthetic construct
  REGION 1..121: note = VH Protein Sequence
QVQLVQSGAEVKKPGASVKVSCKASGYTFTGYYMHWVRQAPGQGLEWMGRFNLHSGVTNYAQKFQGRVTMTRDTSISTVYMDLSRLRSDDTAVYYCARERQWLVQDYFDYWGQGTLVTVSS

SEQ ID NO: 87 - protein, 120 aa, synthetic construct
  REGION 1..120: note = VH Protein Sequence
QVQLVESGGGVVQPGRSLRLSCAASGFTFSNYGMHWVRQAPGKGLEWVSFIWYDGSHRYYADSVKGRFTISRDNSKNTLYLQMNSLRAEDTAVYYCAKGRGGLDWYFDLWGRGTLVTVSS

SEQ ID NO: 88 - protein, 118 aa, synthetic construct; identical to SEQ ID NO: 9
  REGION 1..118: note = VH Protein Sequence

SEQ ID NO: 89 - protein, 118 aa, synthetic construct
  REGION 1..118: note = VH Protein Sequence
EVQLLESGGNLVQPGGSLRLSCAASGFTFGSYVMTWGRQAPGKGLEWVSTISASGGSTYYADSVKGRFTISRDNSKNTLYLQMNSLRAEDTAVYYCAKDKWGKGFDIWGQGTMVTVSS

SEQ ID NO: 90 - protein, 122 aa, synthetic construct; identical to SEQ ID NO: 81
  REGION 1..122: note = VH Protein Sequence

SEQ ID NO: 91 - protein, 117 aa, synthetic construct
  REGION 1..117: note = VH Protein Sequence
EVQLVESGGGLVQSGGSLRFSCAASGFTFSSHPMNWVRQVPGKGLEWVSSISGSGGSTYYADFVKGRFTISRDNSKNTLYLQMNSLRAEDTAVYYCAKGHNSGWKYWGQGTLVTVSS

SEQ ID NO: 92 - protein, 118 aa, synthetic construct
  REGION 1..118: note = VH Protein Sequence
EVQLLESGGGLVQPGGSLSLSCAASGFTFSRYGMHWVRQAPGKGLEWVSAISASGGSTYYADSVKGRFTISRDNSKNTLYLQMNSLRAEDTAVYYCAKDKWGYAFDIWGQGTTVTVSS

SEQ ID NO: 93 - protein, 120 aa, synthetic construct
  REGION 1..120: note = VH Protein Sequence
QVQLVQSGAEVKKPGSSVKVSCKASGGTFNSYAISWVRQAPGQGLEWMGGITPIFGTAKYAQKFQGRVTITADKSTSTTYMELSSLRSEDTAVYYCARPGIIVAGPFDYWGQGTLVTVSS

SEQ ID NO: 94 - protein, 9 aa, synthetic construct
  REGION 1..9: note = VH CDR1
FTFSSYAMN

SEQ ID NO: 95 - protein, 17 aa, synthetic construct
  REGION 1..17: note = VH CDR2
GISGSGGSTYYADSVKG

SEQ ID NO: 96 - protein, 14 aa, synthetic construct
  REGION 1..14: note = VH CDR3
AKDQRITMVRGVIG

SEQ ID NO: 97 - protein, 9 aa, synthetic construct
  REGION 1..9: note = VH CDR1
FTFSSHAMN

SEQ ID NO: 98 - protein, 17 aa, synthetic construct
  REGION 1..17: note = VH CDR2
AISGSGGSTYYADSVKG

SEQ ID NO: 99 - protein, 10 aa, synthetic construct
  REGION 1..10: note = VH CDR3
ARGHNSGWPY

SEQ ID NO: 100 - protein, 9 aa, synthetic construct
  REGION 1..9: note = VH CDR1
FTFSSNAMS

SEQ ID NO: 101 - protein, 17 aa, synthetic construct
  REGION 1..17: note = VH CDR2
AIRGRGGSTYYADSVKG

SEQ ID NO: 102 - protein, 13 aa, synthetic construct
  REGION 1..13: note = VH CDR3
AKDRIVVAGPFDH

SEQ ID NO: 103 - protein, 9 aa, synthetic construct
  REGION 1..9: note = VH CDR1
GSISTYYWN

SEQ ID NO: 104 - protein, 16 aa, synthetic construct
  REGION 1..16: note = VH CDR2
SIYYSGTTNYNPSLKS

SEQ ID NO: 105 - protein, 17 aa, synthetic construct
  REGION 1..17: note = VH CDR3
ARDQGYYHGSGSYFFDY

SEQ ID NO: 106 - protein, 10 aa, synthetic construct
  REGION 1..10: note = VH CDR1
GSIRSSNWWS

SEQ ID NO: 107 - protein, 16 aa, synthetic construct
  REGION 1..16: note = VH CDR2
EIYHGGTTNNNPSLKS

SEQ ID NO: 108 - protein, 11 aa, synthetic construct
  REGION 1..11: note = VH CDR3
ARHRYSSGLDY

SEQ ID NO: 109 - protein, 9 aa, synthetic construct
  REGION 1..9: note = VH CDR1
GSISRYYWS

SEQ ID NO: 110 - protein, 16 aa, synthetic construct
  REGION 1..16: note = VH CDR2
YIFYNKNTNYNPSLKS

SEQ ID NO: 111 - protein, 16 aa, synthetic construct
  REGION 1..16: note = VH CDR3
ARYIAAIYTDLYYFDY

SEQ ID NO: 112 - protein, 9 aa, synthetic construct
  REGION 1..9: note = VH CDR1
GTVSSYAIS

SEQ ID NO: 113 - protein, 17 aa, synthetic construct
  REGION 1..17: note = VH CDR2
GITPIFGTAKYAQKFQG

SEQ ID NO: 114 - protein, 13 aa, synthetic construct
  REGION 1..13: note = VH CDR3
ARGGIAAAGTFDY

SEQ ID NO: 115 - protein, 9 aa, synthetic construct
  REGION 1..9: note = VH CDR1
FTFSSYGMH

SEQ ID NO: 116 - protein, 17 aa, synthetic construct
  REGION 1..17: note = VH CDR2
VMWYDGRNKYYADSVKG

SEQ ID NO: 117 - protein, 18 aa, synthetic construct
  REGION 1..18: note = VH CDR3
ARDRIMVRGVIIPHVFDI

SEQ ID NO: 118 - protein, 9 aa, synthetic construct
  REGION 1..9: note = VH CDR1
FTFSSYVMH

SEQ ID NO: 119 - protein, 17 aa, synthetic construct
  REGION 1..17: note = VH CDR2
VIWYAGNKKYYADSVKG

SEQ ID NO: 120 - protein, 15 aa, synthetic construct
  REGION 1..15: note = VH CDR3
AREYSSSWHYYGMDV

SEQ ID NO: 121 - protein, 10 aa, synthetic construct
  REGION 1..10: note = VH CDR1
GSINSNNWWS

SEQ ID NO: 122 - protein, 16 aa, synthetic construct
  REGION 1..16: note = VH CDR2
DIYHSGSTNYNPSLKS

SEQ ID NO: 123 - protein, 11 aa, synthetic construct
  REGION 1..11: note = VH CDR3
ARRRWLQHFDF

SEQ ID NO: 124 - protein, 9 aa, synthetic construct
  REGION 1..9: note = VH CDR1
YTFTGYYMH

SEQ ID NO: 125 - protein, 17 aa, synthetic construct
  REGION 1..17: note = VH CDR2
RFNLHSGVTNYAQKFQG

SEQ ID NO: 126 - protein, 14 aa, synthetic construct
  REGION 1..14: note = VH CDR3
ARERQWLVQDYFDY

SEQ ID NO: 127 - protein, 9 aa, synthetic construct
  REGION 1..9: note = VH CDR1
FTFSNYGMH

SEQ ID NO: 128 - protein, 17 aa, synthetic construct
  REGION 1..17: note = VH CDR2
FIWYDGSHRYYADSVKG

SEQ ID NO: 129 - protein, 13 aa, synthetic construct
  REGION 1..13: note = VH CDR3
AKGRGGLDWYFDL

SEQ ID NO: 130 - protein, 10 aa, synthetic construct
  REGION 1..10: note = VH CDR1
YSISSGYYWG

SEQ ID NO: 131 - protein, 16 aa, synthetic construct
  REGION 1..16: note = VH CDR2
RIYHSGTTSYNPSLKR

SEQ ID NO: 132 - protein, 11 aa, synthetic construct
  REGION 1..11: note = VH CDR3
ARNWGGNWFDP

SEQ ID NO: 133 - protein, 9 aa, synthetic construct
  REGION 1..9: note = VH CDR1
FTFGSYVMT

SEQ ID NO: 134 - protein, 17 aa, synthetic construct
  REGION 1..17: note = VH CDR2
TISASGGSTYYADSVKG

SEQ ID NO: 135 - protein, 11 aa, synthetic construct
  REGION 1..11: note = VH CDR3
AKDKWGKGFDI

SEQ ID NO: 136 - protein, 9 aa, synthetic construct
  REGION 1..9: note = VH CDR1
GSISRYYWS

SEQ ID NO: 137 - protein, 16 aa, synthetic construct
  REGION 1..16: note = VH CDR2
YIFYNKNTNYNPSLKS

SEQ ID NO: 138 - protein, 16 aa, synthetic construct
  REGION 1..16: note = VH CDR3
ARYIAAIYTDLYYFDY

SEQ ID NO: 139 - protein, 9 aa, synthetic construct
  REGION 1..9: note = VH CDR1
FTFSSHPMN

SEQ ID NO: 140 - protein, 17 aa, synthetic construct
  REGION 1..17: note = VH CDR2
SISGSGGSTYYADFVKG

SEQ ID NO: 141 - protein, 10 aa, synthetic construct
  REGION 1..10: note = VH CDR3
AKGHNSGWKY

SEQ ID NO: 142 - protein, 9 aa, synthetic construct
  REGION 1..9: note = VH CDR1
FTFSRYGMH

SEQ ID NO: 143 - protein, 17 aa, synthetic construct
  REGION 1..17: note = VH CDR2
AISASGGSTYYADSVKG

SEQ ID NO: 144 - protein, 11 aa, synthetic construct
  REGION 1..11: note = VH CDR3
AKDKWGYAFDI

SEQ ID NO: 145 - protein, 9 aa, synthetic construct
  REGION 1..9: note = VH CDR1
GTFNSYAIS

SEQ ID NO: 146 - protein, 17 aa, synthetic construct
  REGION 1..17: note = VH CDR2
GITPIFGTAKYAQKFQG

SEQ ID NO: 147 - protein, 13 aa, synthetic construct
  REGION 1..13: note = VH CDR3
ARPGIIVAGPFDY

SEQ ID NO: 148 - protein, 108 aa, synthetic construct
  REGION 1..108: note = VL Protein Sequence
DIQMTQSPSTLSASVGDRVTITCRASQSISSWLAWYQQKPGKAPKLLIYKASSLESGVPSRFSGSGSGTEFTLTISSLQPDDFATYYCQQYVGLITFGQGTRLEIKRT

SEQ ID NO: 149 - protein, 109 aa, synthetic construct
  REGION 1..109: note = VL Protein Sequence
DIQMTQSPSSLSASVGDRVTITCRASQSISIYLNWYQQKPGKAPKLLIYAASSLQSGVPSRCSGSGSGTDFTLTISSLQPEDFATYYCQQSYSTPLTFGGGTKVDIKRT

SEQ ID NO: 150 - protein, 109 aa, synthetic construct
  REGION 1..109: note = VL Protein Sequence
DIQLTQSPSFLSASVGDRVTITCRASQGISSYLAWYQQKPGKAPKLLIYAASTLQSGVPSRFSGSGSGTEFTLTISSLQPEDFATYYCQQLNRYPLTFGGGTKVDIKRT

SEQ ID NO: 151 - protein, 109 aa, synthetic construct
  REGION 1..109: note = VL Protein Sequence
EIVMTQSPATLSVSPGERATLSCRASQSVSSHLAWYQQKPGQAPRLLIYGASTRATGIPARFSGSGSGTEFTLTISSLQSEDFAIFYCQQYNNWPLTFGGGTKVDIKRT

SEQ ID NO: 152 - protein, 108 aa, synthetic construct
  REGION 1..108: note = VL Protein Sequence
DIQMTQTPSTLSASVGDRVTITCRGSHSISNWLGWYRHKPRKAPNLLIYKASSLKSGVPSRFSGSGSGTEFTLTITSLQPDDFATYYCQQYNHYSTFGQGTKVDIKRT

SEQ ID NO: 153 - protein, 109 aa, synthetic construct
  REGION 1..109: note = VL Protein Sequence
DIQLTQSPSFLSASVGDRVTITCRASQGISSYLAWYQQKPGKAPKLLIYAASTLQSGVPSRFSGSGSGTEFTLTISSLQPEDFATYYCQQLNSYPLTFGGGTKVEIKRT

SEQ ID NO: 154 - protein, 109 aa, synthetic construct
  REGION 1..109: note = VL Protein Sequence
DIQMTQSPSTLSASVGDRVTITCRASQSISSWLAWYQQKPGKAPKLLIYKASSLESGVPSRFSGSGSGTEFTLTISSLQPDDFATYYCQQYNSYSWTFGQGTKVDIKRT

SEQ ID NO: 155 - protein, 108 aa, synthetic construct
  REGION 1..108: note = VL Protein Sequence
EIVMTQSPATLSVSPGERATLSCRASQSVSSNLGWYQQKPGQAPRLLIYGASTRATGIPARFSGSGSGTEFILTISSLQSEDFAVYYCQEYNNWWTFGQGTKVDIKRT

SEQ ID NO: 156 - protein, 109 aa, synthetic construct
  REGION 1..109: note = VL Protein Sequence
DIQLTQSPSFLSASVGDRVTITCRASQGISSYLAWYQQKPGKAPKLLIYAASTLQSGVPSRFSGSGSGTEFTLTISSLQPEDFATYYCQQLNSYPLTFGGGTKVDIKRT

SEQ ID NO: 157 - protein, 109 aa, synthetic construct
  REGION 1..109: note = VL Protein Sequence
DIQMTQSPSTLSASVGDRVTITCRASQSITNWLAWYQQKPGKAPKLLIYKASSLESGVPSRFSGSGSGTEFTLAISSLQPDDFATYYCQQYNIYPLAFGGGTKVEIKRT

SEQ ID NO: 158 - protein, 109 aa, synthetic construct
  REGION 1..109: note = VL Protein Sequence
DIQMTQSPSSLSASVGDRVTITCRASQSISNYLNWYQQKPGKAPNLLICAASSLQSGVPSRFSGSGSGTDFTLTISSLQPEDFATYYCQQSYSIPPTFGQGTKVDIKRT

SEQ ID NO: 159 - protein, 109 aa, synthetic construct
  REGION 1..109: note = VL Protein Sequence
DIQMTQSPSTLSASVGDRVTITCRASQSISSWLAWYQQKPGKAPKLLIYKASSLESGVPSRFSGSGSGTEFTLTISSLQPDDFATYYCLQYNSYSYTFGQGTKLEIKRT

SEQ ID NO: 160 - protein, 108 aa, synthetic construct
  REGION 1..108: note = VL Protein Sequence
DIQMTQSPSSLSASVGDRVTITCRASQGISNYLAWYQQKPGKVPKLLIYAASTLQSGVPSRFSGSGSGTDFTLTISSLQPEDVATYYCQKYNSARTFGQGTKVDIKRT

SEQ ID NO: 161 - protein, 109 aa, synthetic construct
  REGION 1..109: note = VL Protein Sequence
DIQLTQSPSFLSASVGDRVTITCRASQGISSYLAWYQQKPGKAPKLLIYAASTLQSGVPSRFSGSGSGTEFTLTISSLQPEDFATYYCQQLNSYPPTFGGGTKVEIKRT

SEQ ID NO: 162 - protein, 109 aa, synthetic construct
  REGION 1..109: note = VL Protein Sequence
DIQLTQSPSFLSASVGDRVTITCRASQGISSYLAWYQQKPGKAPKLLIYAASTLQSGVPSRFSGSGSGTEFTLTISSLQPEDFATYHCQQLNSYPLTFGGMTKVEIKRT

SEQ ID NO: 163 - protein, 109 aa, synthetic construct
  REGION 1..109: note = VL Protein Sequence
DIQLTQSPSFLSASVGDRVTITCRASQGISSYLAWYQQKPGKAPKLLIYAASTLQSGVPSRFSGSGSGTEFTLTISSLQPEDFATYYCQQLNSYPPTFGQGTKVDIKRT

SEQ ID NO: 164 - protein, 108 aa, synthetic construct
  REGION 1..108: note = VL Protein Sequence
DIQMTQSPSTLSASVGDRVTITCRASQSISNWLAWYQQKPGKAPKLLIYKASSLESGVPSRFSGSGSGTEFTLTISSLQPDDFATYYCLQYNHYSTFGQGTKVDIKRT

SEQ ID NO: 165 - protein, 109 aa, synthetic construct
  REGION 1..109: note = VL Protein Sequence
DIQMTQSPSTLSASVGDRVTITCRASQSISSWLAWYQQKPGKAPKLLIYKASSLESGVPSRFSGSGSGTEFTLTISSLQPDDFATYYCQQYNSYSWTFGQGTKLEIKRT

SEQ ID NO: 166 - protein, 11 aa, synthetic construct
  REGION 1..11: note = VL CDR1
RASQSISSWLA

SEQ ID NO: 167 - protein, 7 aa, synthetic construct
  REGION 1..7: note = VL CDR2
KASSLES

SEQ ID NO: 168 - protein, 8 aa, synthetic construct
  REGION 1..8: note = VL CDR3
QQYVGLIT

SEQ ID NO: 169 - protein, 11 aa, synthetic construct
  REGION 1..11: note = VL CDR1
RASQSISIYLN

SEQ ID NO: 170 - protein, 7 aa, synthetic construct
  REGION 1..7: note = VL CDR2
AASSLQS

SEQ ID NO: 171 - protein, 9 aa, synthetic construct
  REGION 1..9: note = VL CDR3
QQSYSTPLT

SEQ ID NO: 172 - protein, 11 aa, synthetic construct
  REGION 1..11: note = VL CDR1
RASQGISSYLA

SEQ ID NO: 173 - protein, 7 aa, synthetic construct
  REGION 1..7: note = VL CDR2
AASTLQS

SEQ ID NO: 174 - protein, 9 aa, synthetic construct
  REGION 1..9: note = VL CDR3
QQLNRYPLT

SEQ ID NO: 175 - protein, 11 aa, synthetic construct
  REGION 1..11: note = VL CDR1
RASQSVSSHLA

SEQ ID NO: 176 - protein, 7 aa, synthetic construct
  REGION 1..7: note = VL CDR2
GASTRAT

SEQ ID NO: 177 - protein, 9 aa, synthetic construct
  REGION 1..9: note = VL CDR3
QQYNNWPLT

SEQ ID NO: 178 - protein, 11 aa, synthetic construct
  REGION 1..11: note = VL CDR1
RGSHSISNWLG

SEQ ID NO: 179 - protein, 7 aa, synthetic construct
  REGION 1..7: note = VL CDR2
KASSLKS

SEQ ID NO: 180 - protein, 8 aa, synthetic construct
  REGION 1..8: note = VL CDR3
QQYNHYST

SEQ ID NO: 181 - protein, 11 aa, synthetic construct
  REGION 1..11: note = VL CDR1
RASQGISSYLA

SEQ ID NO: 182 - protein, 7 aa, synthetic construct
  REGION 1..7: note = VL CDR2
AASTLQS

SEQ ID NO: 183 - protein, 9 aa, synthetic construct
  REGION 1..9: note = VL CDR3
QQLNSYPLT

SEQ ID NO: 184 - protein, 11 aa, synthetic construct
  REGION 1..11: note = VL CDR1
RASQSISSWLA

SEQ ID NO: 185 - protein, 7 aa, synthetic construct
  REGION 1..7: note = VL CDR2
KASSLES

SEQ ID NO: 186 - protein, 9 aa, synthetic construct
  REGION 1..9: note = VL CDR3
QQYNSYSWT

SEQ ID NO: 187 - protein, 11 aa, synthetic construct
  REGION 1..11: note = VL CDR1
RASQSVSSNLG

SEQ ID NO: 188 - protein, 7 aa, synthetic construct
  REGION 1..7: note = VL CDR2
GASTRAT

SEQ ID NO: 189 - protein, 8 aa, synthetic construct
  REGION 1..8: note = VL CDR3
QEYNNWWT

SEQ ID NO: 190 - protein, 11 aa, synthetic construct
  REGION 1..11: note = VL CDR1
RASQGISSYLA

SEQ ID NO: 191 - protein, 7 aa, synthetic construct
  REGION 1..7: note = VL CDR2
AASTLQS

SEQ ID NO: 192 - protein, 9 aa, synthetic construct
  REGION 1..9: note = VL CDR3
QQLNSYPLT

SEQ ID NO: 193 - protein, 11 aa, synthetic construct
  REGION 1..11: note = VL CDR1
RASQSITNWLA

SEQ ID NO: 194 - protein, 7 aa, synthetic construct
  REGION 1..7: note = VL CDR2
KASSLES

SEQ ID NO: 195 - protein, 9 aa, synthetic construct
  REGION 1..9: note = VL CDR3
QQYNIYPLA

SEQ ID NO: 196 - protein, 11 aa, synthetic construct
  REGION 1..11: note = VL CDR1
RASQSISNYLN

SEQ ID NO: 197 - protein, 7 aa, synthetic construct
  REGION 1..7: note = VL CDR2
AASSLQS

SEQ ID NO: 198 - protein, 9 aa, synthetic construct
  REGION 1..9: note = VL CDR3
QQSYSIPPT

SEQ ID NO: 199 - protein, 11 aa, synthetic construct
  REGION 1..11: note = VL CDR1
RASQSISSWLA

SEQ ID NO: 200 - protein, 7 aa, synthetic construct
  REGION 1..7: note = VL CDR2
KASSLES

SEQ ID NO: 201 - protein, 9 aa, synthetic construct
  REGION 1..9: note = VL CDR3
LQYNSYSYT

SEQ ID NO: 202 - protein, 11 aa, synthetic construct
  REGION 1..11: note = VL CDR1
RASQGISNYLA

SEQ ID NO: 203 - protein, 7 aa, synthetic construct
  REGION 1..7: note = VL CDR2
AASTLQS

SEQ ID NO: 204 - protein, 8 aa, synthetic construct
  REGION 1..8: note = VL CDR3
QKYNSART

SEQ ID NO: 205 - protein, 11 aa, synthetic construct
  REGION 1..11: note = VL CDR1
RASQGISSYLA

SEQ ID NO: 206 - protein, 7 aa, synthetic construct
  REGION 1..7: note = VL CDR2
AASTLQS

SEQ ID NO: 207 - protein, 9 aa, synthetic construct
  REGION 1..9: note = VL CDR3
QQLNSYPPT

SEQ ID NO: 208 - protein, 11 aa, synthetic construct
  REGION 1..11: note = VL CDR1
RASQGISSYLA

SEQ ID NO: 209 - protein, 7 aa, synthetic construct
  REGION 1..7: note = VL CDR2
AASTLQS

SEQ ID NO: 210 - protein, 9 aa, synthetic construct
  REGION 1..9: note = VL CDR3
QQLNSYPLT

SEQ ID NO: 211 - protein, 11 aa, synthetic construct
  REGION 1..11: note = VL CDR1
RASQGISSYLA

SEQ ID NO: 212 - protein, 7 aa, synthetic construct
  REGION 1..7: note = VL CDR2
AASTLQS

SEQ ID NO: 213 - protein, 9 aa, synthetic construct
  REGION 1..9: note = VL CDR3
QQLNSYPPT

SEQ ID NO: 214 - protein, 11 aa, synthetic construct
  REGION 1..11: note = VL CDR1
RASQSISNWLA

SEQ ID NO: 215 - protein, 7 aa, synthetic construct
  REGION 1..7: note = VL CDR2
KASSLES

SEQ ID NO: 216 - protein, 8 aa, synthetic construct
  REGION 1..8: note = VL CDR3
LQYNHYST

SEQ ID NO: 217 - protein, 11 aa, synthetic construct
  REGION 1..11: note = VL CDR1
RASQSISSWLA

SEQ ID NO: 218 - protein, 7 aa, synthetic construct
  REGION 1..7: note = VL CDR2
KASSLES

SEQ ID NO: 219 - protein, 9 aa, synthetic construct
  REGION 1..9: note = VL CDR3
QQYNSYSWT

SEQ ID NO: 220 - protein, 8 aa, synthetic construct
  REGION 1..8: note = CDR-H1 (Custom2) of TSLPR-4 VH Protein (1A9)
YSISSGYY

SEQ ID NO: 221 - protein, 11 aa, synthetic construct
  REGION 1..11: note = CDR-H3 (Custom2) of TSLPR-4 VH Protein (1A9)
ARNWGGNWFDP

SEQ ID NO: 222 - protein, 11 aa, synthetic construct
  REGION 1..11: note = CDR-H3 (Custom2) of TSLPR-6 Heavy Chain (1B7)
ARHRYSNGLDY

SEQ ID NO: 223 - protein, 17 aa, synthetic construct
  REGION 1..17: note = CDR-H2 (Custom2) of TSLPR-21 Heavy Chain (1C3)
RFNLHGGVADYAQKFQG

SEQ ID NO: 224 - protein, 14 aa, synthetic construct
  REGION 1..14: note = CDR-H3 (Custom2) of TSLPR-21 Heavy Chain (1C3)
ARERQWLVQDYFDY

SEQ ID NO: 225 - protein, 330 aa, synthetic construct
  REGION 1..330: note = IgG1 CH1, 2, &3 WT
ASTKGPSVFPLAPSSKSTSGGTAALGCLVKDYFPEPVTVSWNSGALTSGVHTFPAVLQSSGLYSLSSVVTVPSSSLGTQTYICNVNHKPSNTKVDKKVEPKSCDKTHTCPPCPAPELLGGPSVFLFPPKPKDTLMISRTPEVTCVVVDVSHEDPEVKFNWYVDGVEVHNAKTKPREEQYNSTYRVVSVLTVLHQDWLNGKEYKCKVSNKALPAPIEKTISKAKGQPREPQVYTLPPSREEMTKNQVSLTCLVKGFYPSDIAVEWESNGQPENNYKTTPPVLDSDGSFFLYSKLTVDKSRWQQGNVFSCSVMHEALHNHYTQKSLSLSPGK

SEQ ID NO: 226 - protein, 330 aa, synthetic construct
  REGION 1..330: note = IgG1 CH1, 2, &3 S239D/I332E
ASTKGPSVFPLAPSSKSTSGGTAALGCLVKDYFPEPVTVSWNSGALTSGVHTFPAVLQSSGLYSLSSVVTVPSSSLGTQTYICNVNHKPSNTKVDKKVEPKSCDKTHTCPPCPAPELLGGPDVFLFPPKPKDTLMISRTPEVTCVVVDVSHEDPEVKFNWYVDGVEVHNAKTKPREEQYNSTYRVVSVLTVLHQDWLNGKEYKCKVSNKALPAPEEKTISKAKGQPREPQVYTLPPSREEMTKNQVSLTCLVKGFYPSDIAVEWESNGQPENNYKTTPPVLDSDGSFFLYSKLTVDKSRWQQGNVFSCSVMHEALHNHYTQKSLSLSPGK

SEQ ID NO: 227 - protein, 108 aa, synthetic construct
  REGION 1..108: note = VL 1A9
EIVLTQSPATLSLSPGERATLSCRASQSVSSYLAWYQQKPGQAPRLLIYDASNRATGIPARFSGSGSGTDFTLTISSLEPEDFAVYYCQQRSTWLTFGGGTKVDIKRT

SEQ ID NO: 228 - protein, 108 aa, synthetic construct
  REGION 1..108: note = VL 1B7
DIQMTQSPSTLSASVGDRVTITCRASQSISNWLAWYQQKPGKAPKLLIYKASSLESGVPSRFSGSGSGTEFTLTISSLQPDDFATYYCQQYNHYSTFGQGTKLEIKRT

SEQ ID NO: 229 - protein, 109 aa, synthetic construct
  REGION 1..109: note = VL 1C3
  source 1..109: note = Gly-Ser 15
DIQMTQSPSSLSASVGDRVTITCRASQSISRSLNWYQQKPGKAPQLLIYAASSLQSGVPSRFSGSGSGTDFTLTISSLEPEDFATYHCQQSYSISVTFGGGTKVDIKRT

SEQ ID NO: 230 - protein, 15 aa, synthetic construct
  source 1..15: note = Gly-Ser 15
GGGGSGGGGSGGGGS

SEQ ID NO: 231 - protein, 18 aa, synthetic construct
  source 1..18: note = Whitlow linker
GSTSGSGKPGSGEGSTKG

SEQ ID NO: 232 - protein, 14 aa, synthetic construct
  source 1..14: note = 6paxA_1 (+A)
IRPRAIGGSKPRVA

SEQ ID NO: 233 - protein, 15 aa, synthetic construct
  source 1..15: note = +B
GKGGSGKGGSGKGGS

SEQ ID NO: 234 - protein, 15 aa, synthetic construct
  source 1..15: note = +C
GGKGSGGKGSGGKGS

SEQ ID NO: 235 - protein, 15 aa, synthetic construct
  source 1..15: note = +D
GGGKSGGGKSGGGKS

SEQ ID NO: 236 - protein, 15 aa, synthetic construct
  source 1..15: note = +E
GKGKSGKGKSGKGKS

SEQ ID NO: 237 - protein, 15 aa, synthetic construct
  source 1..15: note = +F
GGGKSGGKGSGKGGS

SEQ ID NO: 238 - protein, 15 aa, synthetic construct
  source 1..15: note = +G
GKPGSGKPGSGKPGS

SEQ ID NO: 239 - protein, 20 aa, synthetic construct
  source 1..20: note = +H
GKPGSGKPGSGKPGSGKPGS

SEQ ID NO: 240 - protein, 20 aa, synthetic construct
  source 1..20: note = +I
GKGKSGKGKSGKGKSGKGKS

SEQ ID NO: 241 - protein, 20 aa, synthetic construct
  source 1..20: note = Gly-Ser 20
GGGGSGGGGSGGGGSGGGGS

SEQ ID NO: 242 - protein, 14 aa, synthetic construct
  source 1..14: note = 3hsc_2 (-A)
STAGDTHLGGEDFD

SEQ ID NO: 243 - protein, 15 aa, synthetic construct
  source 1..15: note = -B
GEGGSGEGGSGEGGS

SEQ ID NO: 244 - protein, 15 aa, synthetic construct
  source 1..15: note = -C
GGEGSGGEGSGGEGS

SEQ ID NO: 245 - protein, 15 aa, synthetic construct
  source 1..15: note = -D
GGGESGGGESGGGES

SEQ ID NO: 246 - protein, 15 aa, synthetic construct
  source 1..15: note = -E
GEGESGEGESGEGES

SEQ ID NO: 247 - protein, 15 aa, synthetic construct
  source 1..15: note = -F
GGGESGGEGSGEGGS

SEQ ID NO: 248 - protein, 20 aa, synthetic construct
  source 1..20: note = -G
GEGESGEGESGEGESGEGES

SEQ ID NO: 249 - protein, 15 aa, synthetic construct
  source 1..15: note = Additional scFv Linkers
GGGGSGGGGSGGGGS

SEQ ID NO: 250 - protein, 20 aa, synthetic construct
  source 1..20: note = Additional scFv Linkers
GGGGSGGGGSGGGGSGGGGS

SEQ ID NO: 251 - protein, 18 aa, synthetic construct
  source 1..18: note = Additional scFv Linkers
GSTSGSGKPGSGEGSTKG

SEQ ID NO: 252 - protein, 19 aa, synthetic construct
  source 1..19: note = Additional scFv Linkers
PRGASKSGSASQTGSAPGS

SEQ ID NO: 253 - protein, 19 aa, synthetic construct
  source 1..19: note = Additional scFv Linkers
GTAAAGAGAAGGAAAGAAG

SEQ ID NO: 254 - protein, 19 aa, synthetic construct
  source 1..19: note = Additional scFv Linkers
GTSGSSGSGSGGSGSGGGG

SEQ ID NO: 255 - protein, 20 aa, synthetic construct
  source 1..20: note = Additional scFv Linkers
GKPGSGKPGSGKPGSGKPGS

SEQ ID NO: 256 - protein, 20 aa, synthetic construct
  source 1..20: note = Additional scFv Linkers
GGSEGKSSGSGSESKSTGGS

SEQ ID NO: 257 - protein, 5 aa, synthetic construct
  source 1..5: note = (GGGGS)1 or GGGGS
GGGGS

SEQ ID NO: 258 - protein, 10 aa, synthetic construct
  source 1..10: note = (GGGGS)2
GGGGSGGGGS

SEQ ID NO: 259 - protein, 15 aa, synthetic construct
  source 1..15: note = (GGGGS)3
GGGGSGGGGSGGGGS

SEQ ID NO: 260 - protein, 20 aa, synthetic construct
  source 1..20: note = (GGGGS)4
GGGGSGGGGSGGGGSGGGGS

SEQ ID NO: 261 - protein, 25 aa, synthetic construct
  source 1..25: note = (GGGGS)5
GGGGSGGGGSGGGGSGGGGSGGGGS

SEQ ID NO: 262 - protein, 30 aa, synthetic construct
  source 1..30: note = (GGGGS)6
GGGGSGGGGSGGGGSGGGGSGGGGSGGGGS

SEQ ID NO: 263 - protein, 35 aa, synthetic construct
  source 1..35: note = (GGGGS)7
GGGGSGGGGSGGGGSGGGGSGGGGSGGGGSGGGGS

SEQ ID NO: 264 - protein, 5 aa, synthetic construct
  source 1..5: note = (GGGGA)1 or GGGGA
GGGGA

SEQ ID NO: 265 - protein, 10 aa, synthetic construct
  source 1..10: note = (GGGGA)2
GGGGAGGGGA

SEQ ID NO: 266 - protein, 15 aa, synthetic construct
  source 1..15: note = (GGGGA)3
GGGGAGGGGAGGGGA

SEQ ID NO: 267 - protein, 20 aa, synthetic construct
  source 1..20: note = (GGGGA)4
GGGGAGGGGAGGGGAGGGGA

SEQ ID NO: 268 - protein, 25 aa, synthetic construct
  source 1..25: note = (GGGGA)5
GGGGAGGGGAGGGGAGGGGAGGGGA

SEQ ID NO: 269 - protein, 30 aa, synthetic construct
  source 1..30: note = (GGGGA)6
GGGGAGGGGAGGGGAGGGGAGGGGAGGGGA

SEQ ID NO: 270 - protein, 35 aa, synthetic construct
  source 1..35: note = (GGGGA)7
GGGGAGGGGAGGGGAGGGGAGGGGAGGGGAGGGGA

SEQ ID NO: 271 - protein, 30 aa, synthetic construct
  source 1..30: note = 30AA-linker
DPALVHQRPAPPGGGGSGGGGSGGGGSGGG

SEQ ID NO: 272 - protein, 5 aa, synthetic construct
  source 1..5: note = (GKPGS)1 or GKPGS
GKPGS

SEQ ID NO: 273 - protein, 25 aa, synthetic construct
  source 1..25: note = (GKPGS)5
GKPGSGKPGSGKPGSGKPGSGKPGS

SEQ ID NO: 274 - protein, 30 aa, synthetic construct
  source 1..30: note = (GKPGS)6
GKPGSGKPGSGKPGSGKPGSGKPGSGKPGS

SEQ ID NO: 275 - protein, 5 aa, synthetic construct
  source 1..5: note = (GGGES)1 or GGGES
GGGES

SEQ ID NO: 276 - protein, 15 aa, synthetic construct
  source 1..15: note = full hinge
EPKSCDKTHTCPPCP

SEQ ID NO: 277 - protein, 9 aa, synthetic construct
  source 1..9: note = lower half hinge
KTHTCPPCP

SEQ ID NO: 278 - protein, 15 aa, synthetic construct
  source 1..15: note = full hinge C220S variant
EPKSSDKTHTCPPCP

SEQ ID NO: 279 - protein, 19 aa, synthetic construct
  source 1..19: note = flex lower half hinge
GGGGSGGGGSKTHTCPPCP

SEQ ID NO: 280 - protein, 19 aa, synthetic construct
  source 1..19: note = charged lower half hinge1
GKPGSGKPGSKTHTCPPCP

SEQ ID NO: 281 - protein, 14 aa, synthetic construct
  source 1..14: note = charged lower half hinge2
GKPGSKTHTCPPCP

SEQ ID NO: 282 - protein, 5 aa, synthetic construct
  source 1..5: note = upper half hinge
EPKSC

SEQ ID NO: 283 - protein, 15 aa, synthetic construct
  source 1..15: note = flex upper half hinge
EPKSCGGGGSGGGGS

SEQ ID NO: 284 - protein, 15 aa, synthetic construct
  source 1..15: note = charged upper half hinge1
EPKSCGKPGSGKPGS

SEQ ID NO: 285 - protein, 10 aa, synthetic construct
  source 1..10: note = charged upper half hinge2
EPKSCGKPGS

SEQ ID NO: 286 - protein, 216 aa, synthetic construct
  source 1..216: note = Heterodimeric Fc Backbone 1 monomer 1 (-)
APPVAGPSVFLFPPKPKDTLMISRTPEVTCVVVDVKHEDPEVKFNWYVDGVEVHNAKTKPREEEYNSTYRVVSVLTVLHQDWLNGKEYKCKVSNKALPAPIEKTISKAKGQPREPQVYTLPPSREEMTKNQVSLTCDVSGFYPSDIAVEWESDGQPENNYKTTPPVLDSDGSFFLYSKLTVDKSRWEQGDVFSCSVMHEALHNHYTQKSLSLSPGK

SEQ ID NO: 287 - protein, 216 aa, synthetic construct
  source 1..216: note = Heterodimeric Fc Backbone 1 monomer 2 (+)
APPVAGPSVFLFPPKPKDTLMISRTPEVTCVVVDVKHEDPEVKFNWYVDGVEVHNAKTKPREEQYNSTYRVVSVLTVLHQDWLNGKEYKCKVSNKALPAPIEKTISKAKGQPREPQVYTLPPSREQMTKNQVKLTCLVKGFYPSDIAVEWESNGQPENNYKTTPPVLDSDGSFFLYSKLTVDKSRWQQGNVFSCSVMHEALHNHYTQKSLSLSPGK

SEQ ID NO: 288 - protein, 216 aa, synthetic construct; identical to SEQ ID NO: 286
  source 1..216: note = Heterodimeric Fc Backbone 2 monomer 1 (-)

SEQ ID NO: 289 - protein, 216 aa, synthetic construct
  source 1..216: note = Heterodimeric Fc Backbone monomer 2 (+)
APPVAGPSVFLFPPKPKDTLMISRTPEVTCVVVDVKHEDPEVKFNWYVDGVEVHNAKTKPREEQYNSTYRVVSVLTVLHQDWLNGKEYKCKVSNKALPAPIEKTISKAKGQPREPQVYTLPPSREEMTKNQVKLTCLVKGFYPSDIAVEWESNGQPENNYKTTPPVLDSDGSFFLYSKLTVDKSRWQQGNVFSCSVMHEALHNHYTQKSLSLSPGK

SEQ ID NO: 290 - protein, 216 aa, synthetic construct
  source 1..216: note = Heterodimeric Fc Backbone 3 monomer 1 (-)
APPVAGPSVFLFPPKPKDTLMISRTPEVTCVVVDVKHEDPEVKFNWYVDGVEVHNAKTKPREEEYNSTYRVVSVLTVLHQDWLNGKEYKCKVSNKALPAPIEKTISKAKGQPREPQVYTLPPSREEMTKNQVSLTCEVSGFYPSDIAVEWESDGQPENNYKTTPPVLDSDGSFFLYSKLTVDKSRWEQGDVFSCSVMHEALHNHYTQKSLSLSPGK

SEQ ID NO: 291 - protein, 216 aa, synthetic construct; identical to SEQ ID NO: 289
  source 1..216: note = Heterodimeric Fc Backbone 3 monomer 2 (+)

SEQ ID NO: 292 - protein, 216 aa, synthetic construct
  source 1..216: note = Heterodimeric Fc Backbone 4 monomer 1 (-)
APPVAGPSVFLFPPKPKDTLMISRTPEVTCVVVDVKHEDPEVKFNWYVDGVEVHNAKTKPREEEYNSTYRVVSVLTVLHQDWLNGKEYKCKVSNKALPAPIEKTISKAKGQPREPQVYTLPPSREEMTENEVSLTCLVKGFYPSDIAVEWESDGQPENNYKTTPPVLDSDGSFFLYSKLEVDKSRWEQGDVFSCSVMHEALHNHYTQKSLSLSPGK

SEQ ID NO: 293 - protein, 216 aa, synthetic construct
  source 1..216: note = Heterodimeric Fc Backbone 4 monomer 2 (+)
APPVAGPSVFLFPPKPKDTLMISRTPEVTCVVVDVKHEDPEVKFNWYVDGVEVHNAKTKPREEQYNSTYRVVSVLTVLHQDWLNGKEYKCKVSNKALPAPIEKTISKAKGQPREPQVYTLPPSREEMTKNQVSLTCLVKGFYPSDIAVEWESNGQPENNYKTTPPVLDSKGSFFLYSKLTVDKSRWQQGNVFSCSVMHEALHNHYTQKSLSLSPGK

SEQ ID NO: 294 - protein, 216 aa, synthetic construct
  source 1..216: note = Heterodimeric Fc Backbone 5 monomer 1 (-)
APPVAGPSVFLFPPKPKDTLMISRTPEVTCVVVDVKHEDPEVKFNWYVDGVEVHNAKTKPREEEYNSTYRVVSVLTVLHQDWLNGKEYKCKVSNKALPAPIEKTISKAKGQPREPQVYTLPPSRDELTKNQVSLTCDVSGFYPSDIAVEWESDGQPENNYKTTPPVLDSDGSFFLYSKLTVDKSRWEQGDVFSCSVMHEALHNHYTQKSLSLSPGK

SEQ ID NO: 295 - protein, 216 aa, synthetic construct
  source 1..216: note = Heterodimeric Fc Backbone 5 monomer 2 (+)
APPVAGPSVFLFPPKPKDTLMISRTPEVTCVVVDVKHEDPEVKFNWYVDGVEVHNAKTKPREEQYNSTYRVVSVLTVLHQDWLNGKEYKCKVSNKALPAPIEKTISKAKGQPREPQVYTLPPSRDQLTKNQVKLTCLVKGFYPSDIAVEWESNGQPENNYKTTPPVLDSDGSFFLYSKLTVDKSRWQQGNVFSCSVMHEALHNHYTQKSLSLSPGK

SEQ ID NO: 296 - protein, 216 aa, synthetic construct
  source 1..216: note = Heterodimeric Fc Backbone 6 monomer 1 (-)
APPVAGPSVFLFPPKPKDTLMISRTPEVTCVVVDVKHEDPEVKFNWYVDGVEVHNAKTKPREEEYASTYRVVSVLTVLHQDWLNGKEYKCKVSNKALPAPIEKTISKAKGQPREPQVYTLPPSREEMTKNQVSLTCDVSGFYPSDIAVEWESDGQPENNYKTTPPVLDSDGSFFLYSKLTVDKSRWEQGDVFSCSVMHEALHNHYTQKSLSLSPGK

SEQ ID NO: 297 - protein, 216 aa, synthetic construct
  source 1..216: note = Heterodimeric Fc Backbone 6 monomer 2 (+)
APPVAGPSVFLFPPKPKDTLMISRTPEVTCVVVDVKHEDPEVKFNWYVDGVEVHNAKTKPREEQYASTYRVVSVLTVLHQDWLNGKEYKCKVSNKALPAPIEKTISKAKGQPREPQVYTLPPSREQMTKNQVKLTCLVKGFYPSDIAVEWESNGQPENNYKTTPPVLDSDGSFFLYSKLTVDKSRWQQGNVFSCSVMHEALHNHYTQKSLSLSPGK

SEQ ID NO: 298 - protein, 216 aa, synthetic construct
  source 1..216: note = Heterodimeric Fc Backbone 7 monomer 1 (-)
APPVAGPSVFLFPPKPKDTLMISRTPEVTCVVVDVKHEDPEVKFNWYVDGVEVHNAKTKPREEEYSSTYRVVSVLTVLHQDWLNGKEYKCKVSNKALPAPIEKTISKAKGQPREPQVYTLPPSREEMTKNQVSLTCDVSGFYPSDIAVEWESDGQPENNYKTTPPVLDSDGSFFLYSKLTVDKSRWEQGDVFSCSVMHEALHNHYTQKSLSLSPGK

SEQ ID NO: 299 - protein, 216 aa, synthetic construct
  source 1..216: note = Heterodimeric Fc Backbone 7 monomer 2 (+)
APPVAGPSVFLFPPKPKDTLMISRTPEVTCVVVDVKHEDPEVKFNWYVDGVEVHNAKTKPREEQYSSTYRVVSVLTVLHQDWLNGKEYKCKVSNKALPAPIEKTISKAKGQPREPQVYTLPPSREQMTKNQVKLTCLVKGFYPSDIAVEWESNGQPENNYKTTPPVLDSDGSFFLYSKLTVDKSRWQQGNVFSCSVMHEALHNHYTQKSLSLSPGK

SEQ ID NO: 300 - protein, 217 aa, synthetic construct
  source 1..217: note = Heterodimeric Fc Backbone 8 monomer 1 (-)
APEFLGGPSVFLFPPKPKDTLMISRTPEVTCVVVDVSQEDPEVQFNWYVDGVEVHNAKTKPREEEFNSTYRVVSVLTVLHQDWLNGKEYKCKVSNKGLPSSIEKTISKAKGQPREPQVYTLPPSQEEMTKNQVSLTCDVSGFYPSDIAVEWESDGQPENNYKTTPPVLDSDGSFFLYSRLTVDKSRWEEGDVFSCSVMHEALHNHYTQKSLSLSLGK

SEQ ID NO: 301 - protein, 217 aa, synthetic construct
  source 1..217: note = Heterodimeric Fc Backbone 8 monomer 2 (+)
APEFLGGPSVFLFPPKPKDTLMISRTPEVTCVVVDVSQEDPEVQFNWYVDGVEVHNAKTKPREEQFNSTYRVVSVLTVLHQDWLNGKEYKCKVSNKGLPSSIEKTISKAKGQPREPQVYTLPPSQEQMTKNQVKLTCLVKGFYPSDIAVEWESNGQPENNYKTTPPVLDSDGSFFLYSRLTVDKSRWQEGNVFSCSVMHEALHNHYTQKSLSLSLGK

SEQ ID NO: 302 - protein, 216 aa, synthetic construct
  source 1..216: note = Heterodimeric Fc Backbone 9 monomer 1 (-)
APPVAGPSVFLFPPKPKDTLMISRTPEVTCVVVDVSHEDPEVQFNWYVDGVEVHNAKTKPREEEFNSTFRVVSVLTVVHQDWLNGKEYKCKVSNKGLPAPIEKTISKTKGQPREPQVYTLPPSREEMTKNQVSLTCDVSGFYPSDIAVEWESDGQPENNYKTTPPMLDSDGSFFLYSKLTVDKSRWEQGDVFSCSVMHEALHNHYTQKSLSLSPGK

SEQ ID NO: 303 - protein, 216 aa, synthetic construct
  source 1..216: note = Heterodimeric Fc Backbone 9 monomer 2 (+)
APPVAGPSVFLFPPKPKDTLMISRTPEVTCVVVDVSHEDPEVQFNWYVDGVEVHNAKTKPREEQFNSTFRVVSVLTVVHQDWLNGKEYKCKVSNKGLPAPIEKTISKTKGQPREPQVYTLPPSREQMTKNQVKLTCLVKGFYPSDIAVEWESNGQPENNYKTTPPMLDSDGSFFLYSKLTVDKSRWQQGNVFSCSVMHEALHNHYTQKSLSLSPGK

SEQ ID NO: 304 - protein, 216 aa, synthetic construct
  source 1..216: note = Heterodimeric Fc Backbone 10 monomer 1 (-)
APPVAGPSVFLFPPKPKDTLMISRTPEVTCVVVDVKHEDPEVQFNWYVDGVEVHNAKTKPREEEFNSTFRVVSVLTVVHQDWLNGKEYKCKVSNKGLPAPIEKTISKTKGQPREPQVYTLPPSREEMTKNQVSLTCDVSGFYPSDIAVEWESDGQPENNYKTTPPMLDSDGSFFLYSKLTVDKSRWEQGDVFSCSVMHEALHNHYTQKSLSLSPGK

SEQ ID NO: 305 - protein, 216 aa, synthetic construct
  source 1..216: note = Heterodimeric Fc Backbone 10 monomer 2 (+)
APPVAGPSVFLFPPKPKDTLMISRTPEVTCVVVDVKHEDPEVQFNWYVDGVEVHNAKTKPREEQFNSTFRVVSVLTVVHQDWLNGKEYKCKVSNKGLPAPIEKTISKTKGQPREPQVYTLPPSREQMTKNQVKLTCLVKGFYPSDIAVEWESNGQPENNYKTTPPMLDSDGSFFLYSKLTVDKSRWQQGNVFSCSVMHEALHNHYTQKSLSLSPGK

SEQ ID NO: 306 - protein, 216 aa, synthetic construct
  source 1..216: note = Heterodimeric Fc Backbone 11 monomer 1 (-)
APPVAGPSVFLFPPKPKDTLMISRTPEVTCVVVDVKHEDPEVKFNWYVDGVEVHNAKTKPREEEYNSTYRVVSVLTVLHQDWLNGKEYKCKVSNKALPAPIEKTISKAKGQPREPQVYTLPPSREEMTKNQVSLTCDVSGFYPSDIAVEWESDGQPENNYKTTPPVLDSDGSFFLYSKLTVDKSRWEQGDVFSCSVLHEALHSHYTQKSLSLSPGK

SEQ ID NO: 307 - protein, 216 aa, synthetic construct
  source 1..216: note = Heterodimeric Fc Backbone 11 monomer 2 (+)
APPVAGPSVFLFPPKPKDTLMISRTPEVTCVVVDVKHEDPEVKFNWYVDGVEVHNAKTKPREEQYNSTYRVVSVLTVLHQDWLNGKEYKCKVSNKALPAPIEKTISKAKGQPREPQVYTLPPSREQMTKNQVKLTCLVKGFYPSDIAVEWESNGQPENNYKTTPPVLDSDGSFFLYSKLTVDKSRWQQGNVFSCSVLHEALHSHYTQKSLSLSPGK

SEQ ID NO: 308 - protein, 216 aa, synthetic construct
  source 1..216: note = Heterodimeric Fc Backbone 12 monomer 1 (-)
APPVAGPSVFLFPPKPKDTLMISRTPEVTCVVVDVKHEDPEVKFKWYVDGVEVHNAKTKPREEQYNSTYRVVSVLTVLHQDWLNGKEYKCKVSNKALPAPIEKTISKAKGQPREPQVYTLPPSREQMTKNQVKLTCLVKGFYPSDIAVEWESNGQPENNYKTTPPVLDSDGSFFLYSKLTVDKSRWQQGNVFSCSVMHEALHNHYTQKSLSLSPGK

SEQ ID NO: 309 - protein, 216 aa, synthetic construct; identical to SEQ ID NO: 286
  source 1..216: note = Heterodimeric Fc Backbone 12 monomer 2 (+)

SEQ ID NO: 310 - protein, 217 aa, synthetic construct
  source 1..217: note = Heterodimeric Fc Backbone 13 monomer 1
APEAAGGPSVFLFPPKPKDTLMISRTPEVTCVVVSVSHEDPEVKFNWYVDGVEVHNAKTKPREEQYNSTYRVVSVLTVLHQDWLNGKEYKCKVSNKALPAPIEKTISKAKGQPREPQVYTLPPSREEMTKNQVSLWCLVKGFYPSDIAVEWESNGQPENNYKTTPPVLDSDGSFFLYSKLTVDKSRWQQGNVFSCSVMHEALHNHYTQKSLSLSPGK

SEQ ID NO: 311 - protein, 217 aa, synthetic construct
  source 1..217: note = Heterodimeric Fc Backbone 13 monomer 2
APEAAGGPSVFLFPPKPKDTLMISRTPEVTCVVVSVSHEDPEVKFNWYVDGVEVHNAKTKPREEQYNSTYRVVSVLTVLHQDWLNGKEYKCKVSNKALPAPIEKTISKAKGQPREPQVYTLPPSREEMTKNQVSLSCAVKGFYPSDIAVEWESNGQPENNYKTTPPVLDSDGSFFLVSKLTVDKSRWQQGNVFSCSVMHEALHNRFTQKSLSLSPGK

SEQ ID NO: 312 - protein, 217 aa, synthetic construct
  source 1..217: note = Heterodimeric Fc Backbone 14 monomer 1
APEAAGGPSVFLFPPKPKDTLYITREPEVTCVVVSVSHEDPEVKFNWYVDGVEVHNAKTKPREEQYNSTYRVVSVLTVLHQDWLNGKEYKCKVSNKALPAPIEKTISKAKGQPREPQVYTLPPSREEMTKNQVSLWCLVKGFYPSDIAVEWESNGQPENNYKTTPPVLDSDGSFFLYSKLTVDKSRWQQGNVFSCSVMHEALHNHYTQKSLSLSPGK

SEQ ID NO: 313 - protein, 217 aa, synthetic construct
  source 1..217: note = Heterodimeric Fc Backbone 14 monomer 2
APEAAGGPSVFLFPPKPKDTLYITREPEVTCVVVSVSHEDPEVKFNWYVDGVEVHNAKTKPREEQYNSTYRVVSVLTVLHQDWLNGKEYKCKVSNKALPAPIEKTISKAKGQPREPQVYTLPPSREEMTKNQVSLSCAVKGFYPSDIAVEWESNGQPENNYKTTPPVLDSDGSFFLVSKLTVDKSRWQQGNVFSCSVMHEALHNRFTQKSLSLSPGK

SEQ ID NO: 314 - protein, 216 aa, synthetic construct
  source 1..216: note = Heterodimeric Fc Backbone 15 monomer 1
APPVAGPSVFLFPPKPKDTLMISRTPEVTCVVVDVKHEDPEVKFNWYVDGVEVHNAKTKPREEEYNSTYRVVSVLTVLHQDWLNGKEYKCKVSNKALPAPIEKTISKAKGQPREPQVYTLPPSRDELTKNQVSLTCDVSGFYPSDIAVEWESDGQPENNYKTTPPVLDSDGSFFLYSKLTVDKSRWEQGDVFSCSVLHEALHSHYTQKSLSLSPGK

SEQ ID NO: 315 - protein, 216 aa, synthetic construct
  source 1..216: note = Heterodimeric Fc Backbone 15 monomer 2
APPVAGPSVFLFPPKPKDTLMISRTPEVTCVVVDVKHEDPEVKFNWYVDGVEVHNAKTKPREEQYNSTYRVVSVLTVLHQDWLNGKEYKCKVSNKALPAPIEKTISKAKGQPREPQVYTLPPSRDQLTKNQVKLTCLVKGFYPSDIAVEWESNGQPENNYKTTPPVLDSDGSFFLYSKLTVDKSRWQQGNVFSCSVLHEALHSHYTQKSLSLSPGK

SEQ ID NO: 316 - protein, 216 aa, synthetic construct
  source 1..216: note = Heterodimeric Fc Backbone 16 monomer 1
APPVAGPSVFLFPPKPKDTLMISRTPEVTCVVVDVKHEDPEVKFNWYVDGVEVHNAKTKPREEEYNSTYRVVSVLTVLHQDWLNGKEYKCKVSNKALPAPIEKTISKAKGQPREPQVYTLPPSREEMTKNQVSLTCDVSGFYPSDIAVEWESDGQPENNYKTTPPVLDSDGSFFLYSKLTVDKSRWEQGDVFSCSVLHEALHAHYTQKSLSLSPGK

SEQ ID NO: 317 - protein, 216 aa, synthetic construct
  source 1..216: note = Heterodimeric Fc Backbone 16 monomer 2
APPVAGPSVFLFPPKPKDTLMISRTPEVTCVVVDVKHEDPEVKFNWYVDGVEVHNAKTKPREEQYNSTYRVVSVLTVLHQDWLNGKEYKCKVSNKALPAPIEKTISKAKGQPREPQVYTLPPSREQMTKNQVKLTCLVKGFYPSDIAVEWESNGQPENNYKTTPPVLDSDGSFFLYSKLTVDKSRWQQGNVFSCSVLHEALHAHYTQKSLSLSPGK

SEQ ID NO: 318 - protein, 216 aa, synthetic construct
  source 1..216: note = Heterodimeric Fc Backbone 17 monomer 1
APPVAGPSVFLFPPKPKDTLMISRTPEVTCVVVDVKHEDPEVKFNWYVDGVEVHNAKTKPREEEYNSTYRVVSVLTVLHQDWLNGKEYKCKVSNKALPAPIEKTISKAKGQPREPQVYTLPPSRDELTKNQVSLTCDVSGFYPSDIAVEWESDGQPENNYKTTPPVLDSDGSFFLYSKLTVDKSRWEQGDVFSCSVLHEALHAHYTQKSLSLSPGK

SEQ ID NO: 319 - protein, 216 aa, synthetic construct
  source 1..216: note = Heterodimeric Fc Backbone 17 monomer 2
APPVAGPSVFLFPPKPKDTLMISRTPEVTCVVVDVKHEDPEVKFNWYVDGVEVHNAKTKPREEQYNSTYRVVSVLTVLHQDWLNGKEYKCKVSNKALPAPIEKTISKAKGQPREPQVYTLPPSRDQLTKNQVKLTCLVKGFYPSDIAVEWESNGQPENNYKTTPPVLDSDGSFFLYSKLTVDKSRWQQGNVFSCSVLHEALHAHYTQKSLSLSPGK

SEQ ID NO: 320 - protein, 98 aa, synthetic construct
  source 1..98: note = IgG1 CH1(+)
ASTKGPSVFPLAPSSKSTSGGTAALGCLVKDYFPEPVTVSWNSGALTSGVHTFPAVLQSSGLYSLSSVVTVPSSSLGTQTYICNVNHKPSNTKVDKKV

SEQ ID NO: 321 - protein, 98 aa, synthetic construct
  source 1..98: note = IgG1 CH1(-)
ASTKGPSVFPLAPSSKSTSGGTAALGCLVKDYFPEPVTVSWNSGALTSGVHTFPAVLQSSGLYSLSSVVTVPSSSLGTQTYICNVNHKPSDTKVDKKV

SEQ ID NO: 322 - protein, 98 aa, synthetic construct
  source 1..98: note = IgG2 CH1(+)
ASTKGPSVFPLAPCSRSTSESTAALGCLVKDYFPEPVTVSWNSGALTSGVHTFPAVLQSSGLYSLSSVVTVPSSNFGTQTYTCNVDHKPSNTKVDKTV

SEQ ID NO: 323 - protein, 98 aa, synthetic construct
  source 1..98: note = IgG2 CH1(-)
ASTKGPSVFPLAPCSRSTSESTAALGCLVKDYFPEPVTVSWNSGALTSGVHTFPAVLQSSGLYSLSSVVTVPSSNFGTQTYTCNVDHKPSDTKVDKTV

SEQ ID NO: 324 - protein, 98 aa, synthetic construct
  source 1..98: note = IgG4 CH1(+)
ASTKGPSVFPLAPCSRSTSESTAALGCLVKDYFPEPVTVSWNSGALTSGVHTFPAVLQSSGLYSLSSVVTVPSSSLGTKTYTCNVDHKPSNTKVDKRV

SEQ ID NO: 325 - protein, 98 aa, synthetic construct
  source 1..98: note = IgG4 CH1(-)
ASTKGPSVFPLAPCSRSTSESTAALGCLVKDYFPEPVTVSWNSGALTSGVHTFPAVLQSSGLYSLSSVVTVPSSSLGTKTYTCNVDHKPSDTKVDKRV

SEQ ID NO: 326 - protein, 15 aa, synthetic construct
  source 1..15: note = IgG1 hinge
EPKSCDKTHTCPPCP

SEQ ID NO: 327 - protein, 12 aa, synthetic construct
  source 1..12: note = IgG2 hinge
ERKCCVECPPCP

SEQ ID NO: 328 - protein, 12 aa, synthetic construct
  source 1..12: note = IgG4 hinge
ESKYGPPCPSCP

SEQ ID NO: 329 - protein, 107 aa, synthetic construct [sequence omitted]

SEQ ID NO: 330 - protein, 106 aa, synthetic construct
  source 1..106: note = Light Chain Constant Domain Lambda
GQPKAAPSVTLFPPSSEELQANKATLVCLISDFYPGAVTVAWKADSSPVKAGVETTTPSKQSNNKYAASSYLSLTPEQWKSHRSYSCQVTHEGSTVEKTVAPTECS

SEQ ID NO: 331 - protein, 254 aa, synthetic construct
EVQLVESGGGLVQPGGSLRLSCAASGFTFSTYAMNWVRQAPGKGLEWVGRIRSKYNNYATYYADSVKGRFTISRDDSKNTLYLQMNSLRAEDTAVYYCVRHGNFGDSYVSWFAYWGQGTLVTVSSGKPGSGKPGSGKPGSGKPGSQAVVTQEPSLTVSPGGTVTLTCGSSTGAVTTSNYANWVQQKPGKSPRGLIGGTNKRAPGVPARFSGSLLGGKAALTISGAQPEDEADYYCALWYSNHWVFGGGTKLTVL

SEQ ID NO: 332 - protein, 254 aa, synthetic construct
QAVVTQEPSLTVSPGGTVTLTCGSSTGAVTTSNYANWVQQKPGKSPRGLIGGTNKRAPGVPARFSGSLLGGKAALTISGAQPEDEADYYCALWYSNHWVFGGGTKLTVLGKPGSGKPGSGKPGSGKPGSEVQLVESGGGLVQPGGSLRLSCAASGFTFSTYAMNWVRQAPGKGLEWVGRIRSKYNNYATYYADSVKGRFTISRDDSKNTLYLQMNSLRAEDTAVYYCVRHGNFGDSYVSWFAYWGQGTLVTVSS

SEQ ID NO: 333 - protein, 125 aa, synthetic construct
EVQLVESGGGLVQPGGSLRLSCAASGFTFSTYAMNWVRQAPGKGLEWVGRIRSKYNNYATYYADSVKGRFTISRDDSKNTLYLQMNSLRAEDTAVYYCVRHGNFGDSYVSWFAYWGQGTLVTVSS

SEQ ID NO: 334 - protein, 5 aa, synthetic construct
TYAMN

SEQ ID NO: 335 - protein, 19 aa, synthetic construct
RIRSKYNNYATYYADSVKG

SEQ ID NO: 336 - protein, 14 aa, synthetic construct
HGNFGDSYVSWFAY

SEQ ID NO: 337 - protein, 109 aa, synthetic construct
QAVVTQEPSLTVSPGGTVTLTCGSSTGAVTTSNYANWVQQKPGKSPRGLIGGTNKRAPGVPARFSGSLLGGKAALTISGAQPEDEADYYCALWYSNHWVFGGGTKLTVL

SEQ ID NO: 338 - protein, 14 aa, synthetic construct
GSSTGAVTTSNYAN

SEQ ID NO: 339 - protein, 7 aa, synthetic construct
GTNKRAP

SEQ ID NO: 340 - protein, 9 aa, synthetic construct
ALWYSNHWV

SEQ ID NO: 341 - protein, 20 aa, synthetic construct
GKPGSGKPGSGKPGSGKPGS

SEQ ID NO: 342 - protein, 254 aa, synthetic construct
EVQLVESGGGLVQPGGSLRLSCAASGFTFSTYAMNWVRQAPGKGLEWVGRIRSKANNYATYYADSVKGRFTISRDDSKNTLYLQMNSLRAEDTAVYYCVRHGNFGDSYVSWFAYWGQGTLVTVSSGKPGSGKPGSGKPGSGKPGSQAVVTQEPSLTVSPGGTVTLTCGSSTGAVTTSNYANWVQQKPGKSPRGLIGGTNKRAPGVPARFSGSLLGGKAALTISGAQPEDEADYYCALWYSNHWVFGGGTKLTVL

SEQ ID NO: 343 - protein, 254 aa, synthetic construct
QAVVTQEPSLTVSPGGTVTLTCGSSTGAVTTSNYANWVQQKPGKSPRGLIGGTNKRAPGVPARFSGSLLGGKAALTISGAQPEDEADYYCALWYSNHWVFGGGTKLTVLGKPGSGKPGSGKPGSGKPGSEVQLVESGGGLVQPGGSLRLSCAASGFTFSTYAMNWVRQAPGKGLEWVGRIRSKANNYATYYADSVKGRFTISRDDSKNTLYLQMNSLRAEDTAVYYCVRHGNFGDSYVSWFAYWGQGTLVTVSS

SEQ ID NO: 344 - protein, 125 aa, synthetic construct
EVQLVESGGGLVQPGGSLRLSCAASGFTFSTYAMNWVRQAPGKGLEWVGRIRSKANNYATYYADSVKGRFTISRDDSKNTLYLQMNSLRAEDTAVYYCVRHGNFGDSYVSWFAYWGQGTLVTVSS

SEQ ID NO: 345 - protein, 5 aa, synthetic construct
TYAMN

SEQ ID NO: 346 - protein, 19 aa, synthetic construct
RIRSKANNYATYYADSVKG

SEQ ID NO: 347 - protein, 14 aa, synthetic construct
HGNFGDSYVSWFAY

SEQ ID NO: 348 - protein, 109 aa, synthetic construct; identical to SEQ ID NO: 337

SEQ ID NO: 349 - protein, 14 aa, synthetic construct
GSSTGAVTTSNYAN

SEQ ID NO: 350 - skipped

SEQ ID NO: 351 - protein, 9 aa, synthetic construct
ALWYSNHWV

SEQ ID NO: 352 - protein, 20 aa, synthetic construct
GKPGSGKPGSGKPGSGKPGS

SEQ ID NO: 353 - protein, 254 aa, synthetic construct
EVQLVESGGGLVQPGGSLRLSCAASGFTFSTYAMNWVRQAPGKGLEWVGRIRSKYNNYATYYADSVKGRFTISRDDSKNTLYLQMNSLRAEDTAVYYCVRHGNFGDEYVSWFAYWGQGTLVTVSSGKPGSGKPGSGKPGSGKPGSQAVVTQEPSLTVSPGGTVTLTCGSSTGAVTTSNYANWVQQKPGKSPRGLIGGTNKRAPGVPARFSGSLLGGKAALTISGAQPEDEADYYCALWYSNHWVFGGGTKLTVL

SEQ ID NO: 354 - protein, 254 aa, synthetic construct
QAVVTQEPSLTVSPGGTVTLTCGSSTGAVTTSNYANWVQQKPGKSPRGLIGGTNKRAPGVPARFSGSLLGGKAALTISGAQPEDEADYYCALWYSNHWVFGGGTKLTVLGKPGSGKPGSGKPGSGKPGSEVQLVESGGGLVQPGGSLRLSCAASGFTFSTYAMNWVRQAPGKGLEWVGRIRSKYNNYATYYADSVKGRFTISRDDSKNTLYLQMNSLRAEDTAVYYCVRHGNFGDEYVSWFAYWGQGTLVTVSS

SEQ ID NO: 355 - protein, 125 aa, synthetic construct
EVQLVESGGGLVQPGGSLRLSCAASGFTFSTYAMNWVRQAPGKGLEWVGRIRSKYNNYATYYADSVKGRFTISRDDSKNTLYLQMNSLRAEDTAVYYCVRHGNFGDEYVSWFAYWGQGTLVTVSS

SEQ ID NO: 356 - protein, 5 aa, synthetic construct
TYAMN

SEQ ID NO: 357 - protein, 19 aa, synthetic construct
RIRSKYNNYATYYADSVKG

SEQ ID NO: 358 - protein, 14 aa, synthetic construct
HGNFGDEYVSWFAY

SEQ ID NO: 359 - protein, 109 aa, synthetic construct; identical to SEQ ID NO: 337

SEQ ID NO: 360 - protein, 14 aa, synthetic construct
GSSTGAVTTSNYAN

SEQ ID NO: 361 - protein, 7 aa, synthetic construct
GTNKRAP

SEQ ID NO: 362 - protein, 9 aa, synthetic construct
ALWYSNHWV

SEQ ID NO: 363 - protein, 20 aa, synthetic construct
GKPGSGKPGSGKPGSGKPGS

SEQ ID NO: 364 - protein, 254 aa, synthetic construct
EVQLVESGGGLVQPGGSLRLSCAASGFTFSTYAMNWVRQAPGKGLEWVGRIRSKYNNYATYYADSVKGRFTISRDDSKNTLYLQMNSLRAEDTAVYYCVRHGNFGDPYVSWFAYWGQGTLVTVSSGKPGSGKPGSGKPGSGKPGSQAVVTQEPSLTVSPGGTVTLTCGSSTGAVTTSNYANWVQQKPGKSPRGLIGGTNKRAPGVPARFSGSLLGGKAALTISGAQPEDEADYYCALWYSNHWVFGGGTKLTVL

SEQ ID NO: 365 - protein, 254 aa, synthetic construct
QAVVTQEPSLTVSPGGTVTLTCGSSTGAVTTSNYANWVQQKPGKSPRGLIGGTNKRAPGVPARFSGSLLGGKAALTISGAQPEDEADYYCALWYSNHWVFGGGTKLTVLGKPGSGKPGSGKPGSGKPGSEVQLVESGGGLVQPGGSLRLSCAASGFTFSTYAMNWVRQAPGKGLEWVGRIRSKYNNYATYYADSVKGRFTISRDDSKNTLYLQMNSLRAEDTAVYYCVRHGNFGDPYVSWFAYWGQGTLVTVSS

SEQ ID NO: 366 - protein, 125 aa, synthetic construct
EVQLVESGGGLVQPGGSLRLSCAASGFTFSTYAMNWVRQAPGKGLEWVGRIRSKYNNYATYYADSVKGRFTISRDDSKNTLYLQMNSLRAEDTAVYYCVRHGNFGDPYVSWFAYWGQGTLVTVSS

SEQ ID NO: 367 - protein, 5 aa, synthetic construct
TYAMN

SEQ ID NO: 368 - protein, 19 aa, synthetic construct
RIRSKYNNYATYYADSVKG

SEQ ID NO: 369 - protein, 14 aa, synthetic construct
HGNFGDPYVSWFAY

SEQ ID NO: 370 - protein, 109 aa, synthetic construct; identical to SEQ ID NO: 337

SEQ ID NO: 371 - protein, 14 aa, synthetic construct
GSSTGAVTTSNYAN

SEQ ID NO: 372 - protein, 7 aa, synthetic construct
GTNKRAP

SEQ ID NO: 373 - protein, 9 aa, synthetic construct
ALWYSNHWV

SEQ ID NO: 374 - protein, 20 aa, synthetic construct
GKPGSGKPGSGKPGSGKPGS

SEQ ID NO: 375 - protein, 254 aa, synthetic construct
EVQLVESGGGLVQPGGSLRLSCAASGFTFSTYAMNWVRQAPGKGLEWVGRIRSKYNNYATYYADSVKGRFTISRDDSKNTLYLQMNSLRAEDTAVYYCVRHGNFGDSYVSWFDYWGQGTLVTVSSGKPGSGKPGSGKPGSGKPGSQAVVTQEPSLTVSPGGTVTLTCGSSTGAVTTSNYANWVQQKPGKSPRGLIGGTNKRAPGVPARFSGSLLGGKAALTISGAQPEDEADYYCALWYSNHWVFGGGTKLTVL

SEQ ID NO: 376 - protein, 254 aa, synthetic construct
QAVVTQEPSLTVSPGGTVTLTCGSSTGAVTTSNYANWVQQKPGKSPRGLIGGTNKRAPGVPARFSGSLLGGKAALTISGAQPEDEADYYCALWYSNHWVFGGGTKLTVLGKPGSGKPGSGKPGSGKPGSEVQLVESGGGLVQPGGSLRLSCAASGFTFSTYAMNWVRQAPGKGLEWVGRIRSKYNNYATYYADSVKGRFTISRDDSKNTLYLQMNSLRAEDTAVYYCVRHGNFGDSYVSWFDYWGQGTLVTVSS

SEQ ID NO: 377 - protein, 125 aa, synthetic construct
EVQLVESGGGLVQPGGSLRLSCAASGFTFSTYAMNWVRQAPGKGLEWVGRIRSKYNNYATYYADSVKGRFTISRDDSKNTLYLQMNSLRAEDTAVYYCVRHGNFGDSYVSWFDYWGQGTLVTVSS

SEQ ID NO: 378 - protein, 5 aa, synthetic construct
TYAMN

SEQ ID NO: 379 - protein, 19 aa, synthetic construct
RIRSKYNNYATYYADSVKG

SEQ ID NO: 380 - protein, 14 aa, synthetic construct
HGNFGDSYVSWFDY

SEQ ID NO: 381 - protein, 109 aa, synthetic construct; identical to SEQ ID NO: 337

SEQ ID NO: 382 - protein, 14 aa, synthetic construct
GSSTGAVTTSNYAN

SEQ ID NO: 383 - protein, 7 aa, synthetic construct
GTNKRAP

SEQ ID NO: 384 - protein, 9 aa, synthetic construct
ALWYSNHWV

SEQ ID NO: 385 - protein, 20 aa, synthetic construct
GKPGSGKPGSGKPGSGKPGS

SEQ ID NO: 386 - protein, 254 aa, synthetic construct
EVQLVESGGGLVQPGGSLRLSCAASGFTFSTYAMSWVRQAPGKGLEWVGRIRSKYNNYATYYADSVKGRFTISRDDSKNTLYLQMNSLRAEDTAVYYCVRHGNFGDSYVSWFAYWGQGTLVTVSSGKPGSGKPGSGKPGSGKPGSQAVVTQEPSLTVSPGGTVTLTCGSSTGAVTTSNYANWVQQKPGKSPRGLIGGTNKRAPGVPARFSGSLLGGKAALTISGAQPEDEADYYCALWYSNHWVFGGGTKLTVL

SEQ ID NO: 387 - protein, 254 aa, synthetic construct
QAVVTQEPSLTVSPGGTVTLTCGSSTGAVTTSNYANWVQQKPGKSPRGLIGGTNKRAPGVPARFSGSLLGGKAALTISGAQPEDEADYYCALWYSNHWVFGGGTKLTVLGKPGSGKPGSGKPGSGKPGSEVQLVESGGGLVQPGGSLRLSCAASGFTFSTYAMSWVRQAPGKGLEWVGRIRSKYNNYATYYADSVKGRFTISRDDSKNTLYLQMNSLRAEDTAVYYCVRHGNFGDSYVSWFAYWGQGTLVTVSS

SEQ ID NO: 388 - protein, 125 aa, synthetic construct
EVQLVESGGGLVQPGGSLRLSCAASGFTFSTYAMSWVRQAPGKGLEWVGRIRSKYNNYATYYADSVKGRFTISRDDSKNTLYLQMNSLRAEDTAVYYCVRHGNFGDSYVSWFAYWGQGTLVTVSS

SEQ ID NO: 389 - protein, 5 aa, synthetic construct
TYAMS

SEQ ID NO: 390 - protein, 19 aa, synthetic construct
RIRSKYNNYATYYADSVKG

SEQ ID NO: 391 - protein, 14 aa, synthetic construct
HGNFGDSYVSWFAY

SEQ ID NO: 392 - protein, 109 aa, synthetic construct; identical to SEQ ID NO: 337

SEQ ID NO: 393 - protein, 14 aa, synthetic construct
GSSTGAVTTSNYAN

SEQ ID NO: 394 - protein, 7 aa, synthetic construct
GTNKRAP

SEQ ID NO: 395 - protein, 9 aa, synthetic construct
ALWYSNHWV

SEQ ID NO: 396 - protein, 20 aa, synthetic construct
GKPGSGKPGSGKPGSGKPGS

SEQ ID NO: 397 - protein, 447 aa, synthetic construct
QVQLQESGPGLVKPSGTLSLTCAVSGGSISSSNWWSWVRQPPGKGLEWIGEIYHGGTTNNNPSLKSRVTISVDKSKSQFSLKLSSVTAADTAVYYCARHRYSNGLDYWGQGTLVTVSSASTKGPSVFPLAPSSKSTSGGTAALGCLVKDYFPEPVTVSWNSGALTSGVHTFPAVLQSSGLYSLSSVVTVPSSSLGTQTYICNVNHKPSNTKVDKKVEPKSCDKTHTCPPCPAPPVAGPSVFLFPPKPKDTLMISRTPEVTCVVVDVKHEDPEVKFNWYVDGVEVHNAKTKPREEQYNSTYRVVSVLTVLHQDWLNGKEYKCKVSNKALPAPIEKTISKAKGQPREPQVYTLPPSREEMTKNQVSLTCLVKGFYPSDIAVEWESNGQPENNYKTTPPVLDSDGSFFLYSKLTVDKSRWQQGNVFSCSVMHEALHNHYTQKSLSLSPGK

SEQ ID NO: 398 - protein, 213 aa, synthetic construct; identical to SEQ ID NO: 32

SEQ ID NO: 399 - protein, 447 aa, synthetic construct
QVQLQESGPGLVKPSGTLSLTCAVSGGSISSSNWWSWVRQPPGKGLEWIGEIYHGGTTNNNPSLKSRVTISVDKSKSQFSLKLSSVTAADTAVYYCARHRYSNGLDYWGQGTLVTVSSASTKGPSVFPLAPSSKSTSGGTAALGCLVKDYFPEPVTVSWNSGALTSGVHTFPAVLQSSGLYSLSSVVTVPSSSLGTQTYICNVNHKPSDTKVDKKVEPKSCDKTHTCPPCPAPPVAGPSVFLFPPKPKDTLMISRTPEVTCVVVDVKHEDPEVKFNWYVDGVEVHNAKTKPREEEYNSTYRVVSVLTVLHQDWLNGKEYKCKVSNKALPAPIEKTISKAKGQPREPQVYTLPPSREEMTKNQVSLTCDVSGFYPSDIAVEWESDGQPENNYKTTPPVLDSDGSFFLYSKLTVDKSRWEQGDVFSCSVMHEALHNHYTQKSLSLSPGK

SEQ ID NO: 400 - protein, 485 aa, synthetic construct; identical to SEQ ID NO: 33

SEQ ID NO: 401 - protein, 213 aa, synthetic construct; identical to SEQ ID NO: 32

SEQ ID NO: 402 - protein, 447 aa, synthetic construct; identical to SEQ ID NO: 399

SEQ ID NO: 403 - protein, 485 aa, synthetic construct
EVQLVESGGGLVQPGGSLRLSCAASGFTFSTYAMNWVRQAPGKGLEWVGRIRSKANNYATYYADSVKGRFTISRDDSKNTLYLQMNSLRAEDTAVYYCVRHGNFGDSYVSWFAYWGQGTLVTVSSGKPGSGKPGSGKPGSGKPGSQAVVTQEPSLTVSPGGTVTLTCGSSTGAVTTSNYANWVQQKPGKSPRGLIGGTNKRAPGVPARFSGSLLGGKAALTISGAQPEDEADYYCALWYSNHWVFGGGTKLTVLEPKSSDKTHTCPPCPAPPVAGPSVFLFPPKPKDTLMISRTPEVTCVVVDVKHEDPEVKFNWYVDGVEVHNAKTKPREEQYNSTYRVVSVLTVLHQDWLNGKEYKCKVSNKALPAPIEKTISKAKGQPREPQVYTLPPSREQMTKNQVKLTCLVKGFYPSDIAVEWESNGQPENNYKTTPPVLDSDGSFFLYSKLTVDKSRWQQGNVFSCSVMHEALHNHYTQKSLSLSPGK

SEQ ID NO: 404 - protein, 213 aa, synthetic construct; identical to SEQ ID NO: 32

SEQ ID NO: 405 - protein, 447 aa, synthetic construct; identical to SEQ ID NO: 399

SEQ ID NO: 406 - protein, 485 aa, synthetic construct
EVQLVESGGGLVQPGGSLRLSCAASGFTFSTYAMNWVRQAPGKGLEWVGRIRSKYNNYATYYADSVKGRFTISRDDSKNTLYLQMNSLRAEDTAVYYCVRHGNFGDEYVSWFAYWGQGTLVTVSSGKPGSGKPGSGKPGSGKPGSQAVVTQEPSLTVSPGGTVTLTCGSSTGAVTTSNYANWVQQKPGKSPRGLIGGTNKRAPGVPARFSGSLLGGKAALTISGAQPEDEADYYCALWYSNHWVFGGGTKLTVLEPKSSDKTHTCPPCPAPPVAGPSVFLFPPKPKDTLMISRTPEVTCVVVDVKHEDPEVKFNWYVDGVEVHNAKTKPREEQYNSTYRVVSVLTVLHQDWLNGKEYKCKVSNKALPAPIEKTISKAKGQPREPQVYTLPPSREQMTKNQVKLTCLVKGFYPSDIAVEWESNGQPENNYKTTPPVLDSDGSFFLYSKLTVDKSRWQQGNVFSCSVMHEALHNHYTQKSLSLSPGK

SEQ ID NO: 407 - protein, 213 aa, synthetic construct; identical to SEQ ID NO: 32

SEQ ID NO: 408 - protein, 447 aa, synthetic construct; identical to SEQ ID NO: 399

SEQ ID NO: 409 - protein, 485 aa, synthetic construct
EVQLVESGGGLVQPGGSLRLSCAASGFTFSTYAMNWVRQAPGKGLEWVGRIRSKYNNYATYYADSVKGRFTISRDDSKNTLYLQMNSLRAEDTAVYYCVRHGNFGDSYVSWFDYWGQGTLVTVSSGKPGSGKPGSGKPGSGKPGSQAVVTQEPSLTVSPGGTVTLTCGSSTGAVTTSNYANWVQQKPGKSPRGLIGGTNKRAPGVPARFSGSLLGGKAALTISGAQPEDEADYYCALWYSNHWVFGGGTKLTVLEPKSSDKTHTCPPCPAPPVAGPSVFLFPPKPKDTLMISRTPEVTCVVVDVKHEDPEVKFNWYVDGVEVHNAKTKPREEQYNSTYRVVSVLTVLHQDWLNGKEYKCKVSNKALPAPIEKTISKAKGQPREPQVYTLPPSREQMTKNQVKLTCLVKGFYPSDIAVEWESNGQPENNYKTTPPVLDSDGSFFLYSKLTVDKSRWQQGNVFSCSVMHEALHNHYTQKSLSLSPGK

SEQ ID NO: 410 - protein, 213 aa, synthetic construct; identical to SEQ ID NO: 32

SEQ ID NO: 411 - protein, 447 aa, synthetic construct; identical to SEQ ID NO: 399

SEQ ID NO: 412 - protein, 720 aa, synthetic construct
QVQLQESGPGLVKPSGTLSLTCAVSGGSISSSNWWSWVRQPPGKGLEWIGEIYHGGTTNNNPSLKSRVTISVDKSKSQFSLKLSSVTAADTAVYYCARHRYSNGLDYWGQGTLVTVSSASTKGPSVFPLAPSSKSTSGGTAALGCLVKDYFPEPVTVSWNSGALTSGVHTFPAVLQSSGLYSLSSVVTVPSSSLGTQTYICNVNHKPSNTKVDKKVEPKSCGGGGSGGGGSEVQLVESGGGLVQPGGSLRLSCAASGFTFSTYAMNWVRQAPGKGLEWVGRIRSKYNNYATYYADSVKGRFTISRDDSKNTLYLQMNSLRAEDTAVYYCVRHGNFGDSYVSWFAYWGQGTLVTVSSGKPGSGKPGSGKPGSGKPGSQAVVTQEPSLTVSPGGTVTLTCGSSTGAVTTSNYANWVQQKPGKSPRGLIGGTNKRAPGVPARFSGSLLGGKAALTISGAQPEDEADYYCALWYSNHWVFGGGTKLTVLGGGGSGGGGSKTHTCPPCPAPPVAGPSVFLFPPKPKDTLMISRTPEVTCVVVDVKHEDPEVKFNWYVDGVEVHNAKTKPREEQYNSTYRVVSVLTVLHQDWLNGKEYKCKVSNKALPAPIEKTISKAKGQPREPQVYTLPPSREQMTKNQVKLTCLVKGFYPSDIAVEWESNGQPENNYKTTPPVLDSDGSFFLYSKLTVDKSRWQQGNVFSCSVMHEALHNHYTQKSLSLSPGK

SEQ ID NO: 413 - protein, 213 aa, synthetic construct; identical to SEQ ID NO: 32

SEQ ID NO: 414 - protein, 447 aa, synthetic construct; identical to SEQ ID NO: 399

SEQ ID NO: 415 - protein, 720 aa, synthetic construct; identical to SEQ ID NO: 412

SEQ ID NO: 416 - protein, 213 aa, synthetic construct; identical to SEQ ID NO: 32

SEQ ID NO: 417 - protein, 447 aa, synthetic construct; identical to SEQ ID NO: 399

SEQ ID NO: 418 - protein, 720 aa, synthetic construct
QVQLQESGPGLVKPSGTLSLTCAVSGGSISSSNWWSWVRQPPGKGLEWIGEIYHGGTTNNNPSLKSRVTISVDKSKSQFSLKLSSVTAADTAVYYCARHRYSNGLDYWGQGTLVTVSSASTKGPSVFPLAPSSKSTSGGTAALGCLVKDYFPEPVTVSWNSGALTSGVHTFPAVLQSSGLYSLSSVVTVPSSSLGTQTYICNVNHKPSNTKVDKKVEPKSCGGGGSGGGGSQAVVTQEPSLTVSPGGTVTLTCGSSTGAVTTSNYANWVQQKPGKSPRGLIGGTNKRAPGVPARFSGSLLGGKAALTISGAQPEDEADYYCALWYSNHWVFGGGTKLTVLGKPGSGKPGSGKPGSGKPGSEVQLVESGGGLVQPGGSLRLSCAASGFTFSTYAMNWVRQAPGKGLEWVGRIRSKANNYATYYADSVKGRFTISRDDSKNTLYLQMNSLRAEDTAVYYCVRHGNFGDSYVSWFAYWGQGTLVTVSSGGGGSGGGGSKTHTCPPCPAPPVAGPSVFLFPPKPKDTLMISRTPEVTCVVVDVKHEDPEVKFNWYVDGVEVHNAKTKPREEQYNSTYRVVSVLTVLHQDWLNGKEYKCKVSNKALPAPIEKTISKAKGQPREPQVYTLPPSREQMTKNQVKLTCLVKGFYPSDIAVEWESNGQPENNYKTTPPVLDSDGSFFLYSKLTVDKSRWQQGNVFSCSVMHEALHNHYTQKSLSLSPGK

SEQ ID NO: 419 - protein, 213 aa, synthetic construct; identical to SEQ ID NO: 32

SEQ ID NO: 420 - protein, 447 aa, synthetic construct
QVQLQESGPGLVKPSGTLSLTCAVSGGSISSSNWWSWVRQPPGKGLEWIGEIYHGGTTNNNPSLKSRVTISVDKSKSQFSLKLSSVTAADTAVYYCARHRYSNGLDYWGQGTLVTVSSASTKGPSVFPLAPSSKSTSGGTAALGCLVKDYFPEPVTVSWNSGALTSGVHTFPAVLQSSGLYSLSSVVTVPSSSLGTQTYICNVNHKPSDTKVDKKVEPKSCDKTHTCPPCPAPPVAGPSVFLFPPKPKDTLMISRTPEVTCVVVDVKHEDPEVKFNWYVDGVEVHNAKTKPREEEYNSTYRVVSVLTVLHQDWLNGKEYKCKVSNKALPAPIEKTISKAKGQPREPQVYTLPPSREEMTKNQVSLTCDVSGFYPSDIAVEWESDGQPENNYKTTPPVLDSDGSFFLYSKLTVDKSRWEQGDVFSCSVLHEALHSHYTQKSLSLSPGK

SEQ ID NO: 421 - protein, 485 aa, synthetic construct
EVQLVESGGGLVQPGGSLRLSCAASGFTFSTYAMNWVRQAPGKGLEWVGRIRSKYNNYATYYADSVKGRFTISRDDSKNTLYLQMNSLRAEDTAVYYCVRHGNFGDSYVSWFAYWGQGTLVTVSSGKPGSGKPGSGKPGSGKPGSQAVVTQEPSLTVSPGGTVTLTCGSSTGAVTTSNYANWVQQKPGKSPRGLIGGTNKRAPGVPARFSGSLLGGKAALTISGAQPEDEADYYCALWYSNHWVFGGGTKLTVLEPKSSDKTHTCPPCPAPPVAGPSVFLFPPKPKDTLMISRTPEVTCVVVDVKHEDPEVKFNWYVDGVEVHNAKTKPREEQYNSTYRVVSVLTVLHQDWLNGKEYKCKVSNKALPAPIEKTISKAKGQPREPQVYTLPPSREQMTKNQVKLTCLVKGFYPSDIAVEWESNGQPENNYKTTPPVLDSDGSFFLYSKLTVDKSRWQQGNVFSCSVLHEALHSHYTQKSLSLSPGK

SEQ ID NO: 422 - protein, 213 aa, synthetic construct; identical to SEQ ID NO: 32

SEQ ID NO: 423 - protein, 447 aa, synthetic construct; identical to SEQ ID NO: 420

SEQ ID NO: 424 - protein, 485 aa, synthetic construct
EVQLVESGGGLVQPGGSLRLSCAASGFTFSTYAMNWVRQAPGKGLEWVGRIRSKANNYATYYADSVKGRFTISRDDSKNTLYLQMNSLRAEDTAVYYCVRHGNFGDSYVSWFAYWGQGTLVTVSSGKPGSGKPGSGKPGSGKPGSQAVVTQEPSLTVSPGGTVTLTCGSSTGAVTTSNYANWVQQKPGKSPRGLIGGTNKRAPGVPARFSGSLLGGKAALTISGAQPEDEADYYCALWYSNHWVFGGGTKLTVLEPKSSDKTHTCPPCPAPPVAGPSVFLFPPKPKDTLMISRTPEVTCVVVDVKHEDPEVKFNWYVDGVEVHNAKTKPREEQYNSTYRVVSVLTVLHQDWLNGKEYKCKVSNKALPAPIEKTISKAKGQPREPQVYTLPPSREQMTKNQVKLTCLVKGFYPSDIAVEWESNGQPENNYKTTPPVLDSDGSFFLYSKLTVDKSRWQQGNVFSCSVLHEALHSHYTQKSLSLSPGK

SEQ ID NO: 425 - protein, 213 aa, synthetic construct; identical to SEQ ID NO: 32

SEQ ID NO: 426 - protein, 447 aa, synthetic construct; identical to SEQ ID NO: 420

SEQ ID NO: 427 - protein, 720 aa, synthetic construct
QVQLQESGPGLVKPSGTLSLTCAVSGGSISSSNWWSWVRQPPGKGLEWIGEIYHGGTTNNNPSLKSRVTISVDKSKSQFSLKLSSVTAADTAVYYCARHRYSNGLDYWGQGTLVTVSSASTKGPSVFPLAPSSKSTSGGTAALGCLVKDYFPEPVTVSWNSGALTSGVHTFPAVLQSSGLYSLSSVVTVPSSSLGTQTYICNVNHKPSNTKVDKKVEPKSCGGGGSGGGGSEVQLVESGGGLVQPGGSLRLSCAASGFTFSTYAMNWVRQAPGKGLEWVGRIRSKYNNYATYYADSVKGRFTISRDDSKNTLYLQMNSLRAEDTAVYYCVRHGNFGDSYVSWFAYWGQGTLVTVSSGKPGSGKPGSGKPGSGKPGSQAVVTQEPSLTVSPGGTVTLTCGSSTGAVTTSNYANWVQQKPGKSPRGLIGGTNKRAPGVPARFSGSLLGGKAALTISGAQPEDEADYYCALWYSNHWVFGGGTKLTVLGGGGSGGGGSKTHTCPPCPAPPVAGPSVFLFPPKPKDTLMISRTPEVTCVVVDVKHEDPEVKFNWYVDGVEVHNAKTKPREEQYNSTYRVVSVLTVLHQDWLNGKEYKCKVSNKALPAPIEKTISKAKGQPREPQVYTLPPSREQMTKNQVKLTCLVKGFYPSDIAVEWESNGQPENNYKTTPPVLDSDGSFFLYSKLTVDKSRWQQGNVFSCSVLHEALHSHYTQKSLSLSPGK

SEQ ID NO: 428 - protein, 213 aa, synthetic construct; identical to SEQ ID NO: 32

SEQ ID NO: 429 - protein, 447 aa, synthetic construct; identical to SEQ ID NO: 420

SEQ ID NO: 430 - protein, 720 aa, synthetic construct; identical to SEQ ID NO: 427

SEQ ID NO: 431 - protein, 213 aa, synthetic construct; identical to SEQ ID NO: 32

SEQ ID NO: 432 - protein, 447 aa, synthetic construct; identical to SEQ ID NO: 420

SEQ ID NO: 433 - protein, 720 aa, synthetic construct
QVQLQESGPGLVKPSGTLSLTCAVSGGSISSSNWWSWVRQPPGKGLEWIGEIYHGGTTNNNPSLKSRVTISVDKSKSQFSLKLSSVTAADTAVYYCARHRYSNGLDYWGQGTLVTVSSASTKGPSVFPLAPSSKSTSGGTAALGCLVKDYFPEPVTVSWNSGALTSGVHTFPAVLQSSGLYSLSSVVTVPSSSLGTQTYICNVNHKPSNTKVDKKVEPKSCGGGGSGGGGSQAVVTQEPSLTVSPGGTVTLTCGSSTGAVTTSNYANWVQQKPGKSPRGLIGGTNKRAPGVPARFSGSLLGGKAALTISGAQPEDEADYYCALWYSNHWVFGGGTKLTVLGKPGSGKPGSGKPGSGKPGSEVQLVESGGGLVQPGGSLRLSCAASGFTFSTYAMNWVRQAPGKGLEWVGRIRSKANNYATYYADSVKGRFTISRDDSKNTLYLQMNSLRAEDTAVYYCVRHGNFGDSYVSWFAYWGQGTLVTVSSGGGGSGGGGSKTHTCPPCPAPPVAGPSVFLFPPKPKDTLMISRTPEVTCVVVDVKHEDPEVKFNWYVDGVEVHNAKTKPREEQYNSTYRVVSVLTVLHQDWLNGKEYKCKVSNKALPAPIEKTISKAKGQPREPQVYTLPPSREQMTKNQVKLTCLVKGFYPSDIAVEWESNGQPENNYKTTPPVLDSDGSFFLYSKLTVDKSRWQQGNVFSCSVLHEALHSHYTQKSLSLSPGK

SEQ ID NO: 434 - protein, 213 aa, synthetic construct; identical to SEQ ID NO: 32

SEQ ID NO: 435 - protein, 449 aa, synthetic construct
QVQLVQSGAEVKKPGSSVKVSCKASGGTFNSYAISWVRQAPGQGLEWMGGITPIFGTAKYAQKFQGRVTITADKSTSTTYMELSSLRSEDTAVYYCARPGIIVAGPFDYWGQGTLVTVSSASTKGPSVFPLAPSSKSTSGGTAALGCLVKDYFPEPVTVSWNSGALTSGVHTFPAVLQSSGLYSLSSVVTVPSSSLGTQTYICNVNHKPSDTKVDKKVEPKSCDKTHTCPPCPAPPVAGPSVFLFPPKPKDTLMISRTPEVTCVVVDVKHEDPEVKFNWYVDGVEVHNAKTKPREEEYNSTYRVVSVLTVLHQDWLNGKEYKCKVSNKALPAPIEKTISKAKGQPREPQVYTLPPSREEMTKNQVSLTCDVSGFYPSDIAVEWESDGQPENNYKTTPPVLDSDGSFFLYSKLTVDKSRWEQGDVFSCSVMHEALHNHYTQKSLSLSPGK

SEQ ID NO: 436 - protein, 485 aa, synthetic construct; identical to SEQ ID NO: 33

SEQ ID NO: 437 - protein, 214 aa, synthetic construct
DIQMTQSPSTLSASVGDRVTITCRASQSISSWLAWYQQKPGKAPKLLIYKASSLESGVPSRFSGSGSGTEFTLTISSLQPDDFATYYCQQYNSYSWTFGQGTKLEIKRTVAAPSVFIFPPSDEQLKSGTASVVCLLNNFYPREAKVQWKVDNALQSGNSQESVTEQDSKDSTYSLSSTLTLSKADYEKHKVYACEVTHQGLSSPVTKSFNRGEC

SEQ ID NO: 438 - protein, 449 aa, synthetic construct; identical to SEQ ID NO: 435

SEQ ID NO: 439 - protein, 485 aa, synthetic construct; identical to SEQ ID NO: 403

SEQ ID NO: 440 - protein, 214 aa, synthetic construct; identical to SEQ ID NO: 437

SEQ ID NO: 441 - protein, 449 aa, synthetic construct; identical to SEQ ID NO: 435

SEQ ID NO: 442 - protein, 722 aa, synthetic construct
QVQLVQSGAEVKKPGSSVKVSCKASGGTFNSYAISWVRQAPGQGLEWMGGITPIFGTAKYAQKFQGRVTITADKSTSTTYMELSSLRSEDTAVYYCARPGIIVAGPFDYWGQGTLVTVSSASTKGPSVFPLAPSSKSTSGGTAALGCLVKDYFPEPVTVSWNSGALTSGVHTFPAVLQSSGLYSLSSVVTVPSSSLGTQTYICNVNHKPSNTKVDKKVEPKSCGGGGSGGGGSEVQLVESGGGLVQPGGSLRLSCAASGFTFSTYAMNWVRQAPGKGLEWVGRIRSKYNNYATYYADSVKGRFTISRDDSKNTLYLQMNSLRAEDTAVYYCVRHGNFGDSYVSWFAYWGQGTLVTVSSGKPGSGKPGSGKPGSGKPGSQAVVTQEPSLTVSPGGTVTLTCGSSTGAVTTSNYANWVQQKPGKSPRGLIGGTNKRAPGVPARFSGSLLGGKAALTISGAQPEDEADYYCALWYSNHWVFGGGTKLTVLGGGGSGGGGSKTHTCPPCPAPPVAGPSVFLFPPKPKDTLMISRTPEVTCVVVDVKHEDPEVKFNWYVDGVEVHNAKTKPREEQYNSTYRVVSVLTVLHQDWLNGKEYKCKVSNKALPAPIEKTISKAKGQPREPQVYTLPPSREQMTKNQVKLTCLVKGFYPSDIAVEWESNGQPENNYKTTPPVLDSDGSFFLYSKLTVDKSRWQQGNVFSCSVMHEALHNHYTQKSLSLSPGK

SEQ ID NO: 443 - protein, 214 aa, synthetic construct; identical to SEQ ID NO: 437

SEQ ID NO: 444 - protein, 449 aa, synthetic construct; identical to SEQ ID NO: 435

SEQ ID NO: 445 - protein, 722 aa, synthetic construct; identical to SEQ ID NO: 442

SEQ ID NO: 446 - protein, 214 aa, synthetic construct; identical to SEQ ID NO: 437

SEQ ID NO: 447 - protein, 449 aa, synthetic construct; identical to SEQ ID NO: 435

SEQ ID NO: 448 - protein, 722 aa, synthetic construct
QVQLVQSGAEVKKPGSSVKVSCKASGGTFNSYAISWVRQAPGQGLEWMGGITPIFGTAKYAQKFQGRVTITADKSTSTTYMELSSLRSEDTAVYYCARPGIIVAGPFDYWGQGTLVTVSSASTKGPSVFPLAPSSKSTSGGTAALGCLVKDYFPEPVTVSWNSGALTSGVHTFPAVLQSSGLYSLSSVVTVPSSSLGTQTYICNVNHKPSNTKVDKKVEPKSCGGGGSGGGGSQAVVTQEPSLTVSPGGTVTLTCGSSTGAVTTSNYANWVQQKPGKSPRGLIGGTNKRAPGVPARFSGSLLGGKAALTISGAQPEDEADYYCALWYSNHWVFGGGTKLTVLGKPGSGKPGSGKPGSGKPGSEVQLVESGGGLVQPGGSLRLSCAASGFTFSTYAMNWVRQAPGKGLEWVGRIRSKANNYATYYADSVKGRFTISRDDSKNTLYLQMNSLRAEDTAVYYCVRHGNFGDSYVSWFAYWGQGTLVTVSSGGGGSGGGGSKTHTCPPCPAPPVAGPSVFLFPPKPKDTLMISRTPEVTCVVVDVKHEDPEVKFNWYVDGVEVHNAKTKPREEQYNSTYRVVSVLTVLHQDWLNGKEYKCKVSNKALPAPIEKTISKAKGQPREPQVYTLPPSREQMTKNQVKLTCLVKGFYPSDIAVEWESNGQPENNYKTTPPVLDSDGSFFLYSKLTVDKSRWQQGNVFSCSVMHEALHNHYTQKSLSLSPGK

SEQ ID NO: 449 - protein, 214 aa, synthetic construct; identical to SEQ ID NO: 437

SEQ ID NO: 450 - protein, 449 aa, synthetic construct
QVQLVQSGAEVKKPGSSVKVSCKASGGTFNSYAISWVRQAPGQGLEWMGGITPIFGTAKYAQKFQGRVTITADKSTSTTYMELSSLRSEDTAVYYCARPGIIVAGPFDYWGQGTLVTVSSASTKGPSVFPLAPSSKSTSGGTAALGCLVKDYFPEPVTVSWNSGALTSGVHTFPAVLQSSGLYSLSSVVTVPSSSLGTQTYICNVNHKPSDTKVDKKVEPKSCDKTHTCPPCPAPPVAGPSVFLFPPKPKDTLMISRTPEVTCVVVDVKHEDPEVKFNWYVDGVEVHNAKTKPREEEYNSTYRVVSVLTVLHQDWLNGKEYKCKVSNKALPAPIEKTISKAKGQPREPQVYTLPPSREEMTKNQVSLTCDVSGFYPSDIAVEWESDGQPENNYKTTPPVLDSDGSFFLYSKLTVDKSRWEQGDVFSCSVLHEALHSHYTQKSLSLSPGK

SEQ ID NO: 451 - protein, 485 aa, synthetic construct; identical to SEQ ID NO: 421

SEQ ID NO: 452 - protein, 214 aa, synthetic construct; identical to SEQ ID NO: 437

SEQ ID NO: 453 - protein, 449 aa, synthetic construct; identical to SEQ ID NO: 450

SEQ ID NO: 454 - protein, 485 aa, synthetic construct; identical to SEQ ID NO: 424

SEQ ID NO: 455 - protein, 214 aa, synthetic construct; identical to SEQ ID NO: 437

SEQ ID NO: 456 - protein, 449 aa, synthetic construct; identical to SEQ ID NO: 450

SEQ ID NO: 457 - protein, 722 aa, synthetic construct
QVQLVQSGAEVKKPGSSVKVSCKASGGTFNSYAISWVRQAPGQGLEWMGGITPIFGTAKYAQKFQGRVTITADKSTSTTYMELSSLRSEDTAVYYCARPGIIVAGPFDYWGQGTLVTVSSASTKGPSVFPLAPSSKSTSGGTAALGCLVKDYFPEPVTVSWNSGALTSGVHTFPAVLQSSGLYSLSSVVTVPSSSLGTQTYICNVNHKPSNTKVDKKVEPKSCGGGGSGGGGSEVQLVESGGGLVQPGGSLRLSCAASGFTFSTYAMNWVRQAPGKGLEWVGRIRSKYNNYATYYADSVKGRFTISRDDSKNTLYLQMNSLRAEDTAVYYCVRHGNFGDSYVSWFAYWGQGTLVTVSSGKPGSGKPGSGKPGSGKPGSQAVVTQEPSLTVSPGGTVTLTCGSSTGAVTTSNYANWVQQKPGKSPRGLIGGTNKRAPGVPARFSGSLLGGKAALTISGAQPEDEADYYCALWYSNHWVFGGGTKLTVLGGGGSGGGGSKTHTCPPCPAPPVAGPSVFLFPPKPKDTLMISRTPEVTCVVVDVKHEDPEVKFNWYVDGVEVHNAKTKPREEQYNSTYRVVSVLTVLHQDWLNGKEYKCKVSNKALPAPIEKTISKAKGQPREPQVYTLPPSREQMTKNQVKLTCLVKGFYPSDIAVEWESNGQPENNYKTTPPVLDSDGSFFLYSKLTVDKSRWQQGNVFSCSVLHEALHSHYTQKSLSLSPGK

SEQ ID NO: 458 - protein, 214 aa, synthetic construct; identical to SEQ ID NO: 437

SEQ ID NO: 459 - protein, 449 aa, synthetic construct; identical to SEQ ID NO: 450

SEQ ID NO: 460 - protein, 722 aa, synthetic construct; identical to SEQ ID NO: 457

SEQ ID NO: 461 - protein, 214 aa, synthetic construct; identical to SEQ ID NO: 437

SEQ ID NO: 462 - protein, 449 aa, synthetic construct; identical to SEQ ID NO: 450

SEQ ID NO: 463 - protein, 722 aa, synthetic construct
QVQLVQSGAEVKKPGSSVKVSCKASGGTFNSYAISWVRQAPGQGLEWMGGITPIFGTAKYAQKFQGRVTITADKSTSTTYMELSSLRSEDTAVYYCARPGIIVAGPFDYWGQGTLVTVSSASTKGPSVFPLAPSSKSTSGGTAALGCLVKDYFPEPVTVSWNSGALTSGVHTFPAVLQSSGLYSLSSVVTVPSSSLGTQTYICNVNHKPSNTKVDKKVEPKSCGGGGSGGGGSQAVVTQEPSLTVSPGGTVTLTCGSSTGAVTTSNYANWVQQKPGKSPRGLIGGTNKRAPGVPARFSGSLLGGKAALTISGAQPEDEADYYCALWYSNHWVFGGGTKLTVLGKPGSGKPGSGKPGSGKPGSEVQLVESGGGLVQPGGSLRLSCAASGFTFSTYAMNWVRQAPGKGLEWVGRIRSKANNYATYYADSVKGRFTISRDDSKNTLYLQMNSLRAEDTAVYYCVRHGNFGDSYVSWFAYWGQGTLVTVSSGGGGSGGGGSKTHTCPPCPAPPVAGPSVFLFPPKPKDTLMISRTPEVTCVVVDVKHEDPEVKFNWYVDGVEVHNAKTKPREEQYNSTYRVVSVLTVLHQDWLNGKEYKCKVSNKALPAPIEKTISKAKGQPREPQVYTLPPSREQMTKNQVKLTCLVKGFYPSDIAVEWESNGQPENNYKTTPPVLDSDGSFFLYSKLTVDKSRWQQGNVFSCSVLHEALHSHYTQKSLSLSPGK

SEQ ID NO: 464 - protein, 214 aa, synthetic construct; identical to SEQ ID NO: 437

SEQ ID NO: 465 - protein, 447 aa, synthetic construct
QVQLQESGPGLVKPSETLSLTCAVSGYSISSGYYWGWIRQPPGKGLEWIGRIYHSGTTSYNPSLKRRVTISVDTSKNQFSLKLSSVTATDTAVYYCARNWGGNWFDPWGQGTLVTVSSASTKGPSVFPLAPSSKSTSGGTAALGCLVKDYFPEPVTVSWNSGALTSGVHTFPAVLQSSGLYSLSSVVTVPSSSLGTQTYICNVNHKPSDTKVDKKVEPKSCDKTHTCPPCPAPPVAGPSVFLFPPKPKDTLMISRTPEVTCVVVDVKHEDPEVKFNWYVDGVEVHNAKTKPREEEYNSTYRVVSVLTVLHQDWLNGKEYKCKVSNKALPAPIEKTISKAKGQPREPQVYTLPPSREEMTKNQVSLTCDVSGFYPSDIAVEWESDGQPENNYKTTPPVLDSDGSFFLYSKLTVDKSRWEQGDVFSCSVMHEALHNHYTQKSLSLSPGK

SEQ ID NO: 466 - protein, 485 aa, synthetic construct; identical to SEQ ID NO: 33

SEQ ID NO: 467 - protein, 213 aa, synthetic construct
EIVLTQSPATLSLSPGERATLSCRASQSVSSYLAWYQQKPGQAPRLLIYDASNRATGIPARFSGSGSGTDFTLTISSLEPEDFAVYYCQQRSTWLTFGGGTKLDIKRTVAAPSVFIFPPSDEQLKSGTASVVCLLNNFYPREAKVQWKVDNALQSGNSQESVTEQDSKDSTYSLSSTLTLSKADYEKHKVYACEVTHQGLSSPVTKSFNRGEC

SEQ ID NO: 468 - protein, 447 aa, synthetic construct; identical to SEQ ID NO: 465

SEQ ID NO: 469 - protein, 485 aa, synthetic construct; identical to SEQ ID NO: 403

SEQ ID NO: 470 - protein, 213 aa, synthetic construct; identical to SEQ ID NO: 467

SEQ ID NO: 471 - protein, 447 aa, synthetic construct; identical to SEQ ID NO: 465

SEQ ID NO: 472 - protein, 720 aa, synthetic construct
QVQLQESGPGLVKPSETLSLTCAVSGYSISSGYYWGWIRQPPGKGLEWIGRIYHSGTTSYNPSLKRRVTISVDTSKNQFSLKLSSVTATDTAVYYCARNWGGNWFDPWGQGTLVTVSSASTKGPSVFPLAPSSKSTSGGTAALGCLVKDYFPEPVTVSWNSGALTSGVHTFPAVLQSSGLYSLSSVVTVPSSSLGTQTYICNVNHKPSNTKVDKKVEPKSCGGGGSGGGGSEVQLVESGGGLVQPGGSLRLSCAASGFTFSTYAMNWVRQAPGKGLEWVGRIRSKYNNYATYYADSVKGRFTISRDDSKNTLYLQMNSLRAEDTAVYYCVRHGNFGDSYVSWFAYWGQGTLVTVSSGKPGSGKPGSGKPGSGKPGSQAVVTQEPSLTVSPGGTVTLTCGSSTGAVTTSNYANWVQQKPGKSPRGLIGGTNKRAPGVPARFSGSLLGGKAALTISGAQPEDEADYYCALWYSNHWVFGGGTKLTVLGGGGSGGGGSKTHTCPPCPAPPVAGPSVFLFPPKPKDTLMISRTPEVTCVVVDVKHEDPEVKFNWYVDGVEVHNAKTKPREEQYNSTYRVVSVLTVLHQDWLNGKEYKCKVSNKALPAPIEKTISKAKGQPREPQVYTLPPSREQMTKNQVKLTCLVKGFYPSDIAVEWESNGQPENNYKTTPPVLDSDGSFFLYSKLTVDKSRWQQGNVFSCSVMHEALHNHYTQKSLSLSPGK

SEQ ID NO: 473 - protein, 213 aa, synthetic construct; identical to SEQ ID NO: 467

SEQ ID NO: 474 - protein, 447 aa, synthetic construct; identical to SEQ ID NO: 465

SEQ ID NO: 475 - protein, 720 aa, synthetic construct; identical to SEQ ID NO: 472

SEQ ID NO: 476 - protein, 213 aa, synthetic construct; identical to SEQ ID NO: 467

SEQ ID NO: 477 - protein, 447 aa, synthetic construct; identical to SEQ ID NO: 465

SEQ ID NO: 478 - protein, 720 aa, synthetic construct
QVQLQESGPGLVKPSETLSLTCAVSGYSISSGYYWGWIRQPPGKGLEWIGRIYHSGTTSYNPSLKRRVTISVDTSKNQFSLKLSSVTATDTAVYYCARNWGGNWFDPWGQGTLVTVSSASTKGPSVFPLAPSSKSTSGGTAALGCLVKDYFPEPVTVSWNSGALTSGVHTFPAVLQSSGLYSLSSVVTVPSSSLGTQTYICNVNHKPSNTKVDKKVEPKSCGGGGSGGGGSQAVVTQEPSLTVSPGGTVTLTCGSSTGAVTTSNYANWVQQKPGKSPRGLIGGTNKRAPGVPARFSGSLLGGKAALTISGAQPEDEADYYCALWYSNHWVFGGGTKLTVLGKPGSGKPGSGKPGSGKPGSEVQLVESGGGLVQPGGSLRLSCAASGFTFSTYAMNWVRQAPGKGLEWVGRIRSKANNYATYYADSVKGRFTISRDDSKNTLYLQMNSLRAEDTAVYYCVRHGNFGDSYVSWFAYWGQGTLVTVSSGGGGSGGGGSKTHTCPPCPAPPVAGPSVFLFPPKPKDTLMISRTPEVTCVVVDVKHEDPEVKFNWYVDGVEVHNAKTKPREEQYNSTYRVVSVLTVLHQDWLNGKEYKCKVSNKALPAPIEKTISKAKGQPREPQVYTLPPSREQMTKNQVKLTCLVKGFYPSDIAVEWESNGQPENNYKTTPPVLDSDGSFFLYSKLTVDKSRWQQGNVFSCSVMHEALHNHYTQKSLSLSPGK

SEQ ID NO: 479 - protein, 213 aa, synthetic construct; identical to SEQ ID NO: 467

SEQ ID NO: 480 - protein, 447 aa, synthetic construct
QVQLQESGPGLVKPSETLSLTCAVSGYSISSGYYWGWIRQPPGKGLEWIGRIYHSGTTSYNPSLKRRVTISVDTSKNQFSLKLSSVTATDTAVYYCARNWGGNWFDPWGQGTLVTVSSASTKGPSVFPLAPSSKSTSGGTAALGCLVKDYFPEPVTVSWNSGALTSGVHTFPAVLQSSGLYSLSSVVTVPSSSLGTQTYICNVNHKPSDTKVDKKVEPKSCDKTHTCPPCPAPPVAGPSVFLFPPKPKDTLMISRTPEVTCVVVDVKHEDPEVKFNWYVDGVEVHNAKTKPREEEYNSTYRVVSVLTVLHQDWLNGKEYKCKVSNKALPAPIEKTISKAKGQPREPQVYTLPPSREEMTKNQVSLTCDVSGFYPSDIAVEWESDGQPENNYKTTPPVLDSDGSFFLYSKLTVDKSRWEQGDVFSCSVLHEALHSHYTQKSLSLSPGK

SEQ ID NO: 481 - protein, 485 aa, synthetic construct; identical to SEQ ID NO: 421

SEQ ID NO: 482 - protein, 213 aa, synthetic construct; identical to SEQ ID NO: 467

SEQ ID NO: 483 - protein, 447 aa, synthetic construct; identical to SEQ ID NO: 480

SEQ ID NO: 484 - protein, 485 aa, synthetic construct; identical to SEQ ID NO: 424

SEQ ID NO: 485 - protein, 213 aa, synthetic construct; identical to SEQ ID NO: 467

SEQ ID NO: 486 - protein, 447 aa, synthetic construct; identical to SEQ ID NO: 480

SEQ ID NO: 487 - protein, 720 aa, synthetic construct
QVQLQESGPGLVKPSETLSLTCAVSGYSISSGYYWGWIRQPPGKGLEWIGRIYHSGTTSYNPSLKRRVTISVDTSKNQFSLKLSSVTATDTAVYYCARNWGGNWFDPWGQGTLVTVSSASTKGPSVFPLAPSSKSTSGGTAALGCLVKDYFPEPVTVSWNSGALTSGVHTFPAVLQSSGLYSLSSVVTVPSSSLGTQTYICNVNHKPSNTKVDKKVEPKSCGGGGSGGGGSEVQLVESGGGLVQPGGSLRLSCAASGFTFSTYAMNWVRQAPGKGLEWVGRIRSKYNNYATYYADSVKGRFTISRDDSKNTLYLQMNSLRAEDTAVYYCVRHGNFGDSYVSWFAYWGQGTLVTVSSGKPGSGKPGSGKPGSGKPGSQAVVTQEPSLTVSPGGTVTLTCGSSTGAVTTSNYANWVQQKPGKSPRGLIGGTNKRAPGVPARFSGSLLGGKAALTISGAQPEDEADYYCALWYSNHWVFGGGTKLTVLGGGGSGGGGSKTHTCPPCPAPPVAGPSVFLFPPKPKDTLMISRTPEVTCVVVDVKHEDPEVKFNWYVDGVEVHNAKTKPREEQYNSTYRVVSVLTVLHQDWLNGKEYKCKVSNKALPAPIEKTISKAKGQPREPQVYTLPPSREQMTKNQVKLTCLVKGFYPSDIAVEWESNGQPENNYKTTPPVLDSDGSFFLYSKLTVDKSRWQQGNVFSCSVLHEALHSHYTQKSLSLSPGK

SEQ ID NO: 488 - protein, 213 aa, synthetic construct; identical to SEQ ID NO: 467

SEQ ID NO: 489 - protein, 447 aa, synthetic construct; identical to SEQ ID NO: 480

SEQ ID NO: 490 - protein, 720 aa, synthetic construct; identical to SEQ ID NO: 487

SEQ ID NO: 491 - protein, 213 aa, synthetic construct; identical to SEQ ID NO: 467

SEQ ID NO: 492 - protein, 447 aa, synthetic construct; identical to SEQ ID NO: 480

SEQ ID NO: 493 - protein, 720 aa, synthetic construct
QVQLQESGPGLVKPSETLSLTCAVSGYSISSGYYWGWIRQPPGKGLEWIGRIYHSGTTSYNPSLKRRVTISVDTSKNQFSLKLSSVTATDTAVYYCARNWGGNWFDPWGQGTLVTVSSASTKGPSVFPLAPSSKSTSGGTAALGCLVKDYFPEPVTVSWNSGALTSGVHTFPAVLQSSGLYSLSSVVTVPSSSLGTQTYICNVNHKPSNTKVDKKVEPKSCGGGGSGGGGSQAVVTQEPSLTVSPGGTVTLTCGSSTGAVTTSNYANWVQQKPGKSPRGLIGGTNKRAPGVPARFSGSLLGGKAALTISGAQPEDEADYYCALWYSNHWVFGGGTKLTVLGKPGSGKPGSGKPGSGKPGSEVQLVESGGGLVQPGGSLRLSCAASGFTFSTYAMNWVRQAPGKGLEWVGRIRSKANNYATYYADSVKGRFTISRDDSKNTLYLQMNSLRAEDTAVYYCVRHGNFGDSYVSWFAYWGQGTLVTVSSGGGGSGGGGSKTHTCPPCPAPPVAGPSVFLFPPKPKDTLMISRTPEVTCVVVDVKHEDPEVKFNWYVDGVEVHNAKTKPREEQYNSTYRVVSVLTVLHQDWLNGKEYKCKVSNKALPAPIEKTISKAKGQPREPQVYTLPPSREQMTKNQVKLTCLVKGFYPSDIAVEWESNGQPENNYKTTPPVLDSDGSFFLYSKLTVDKSRWQQGNVFSCSVLHEALHSHYTQKSLSLSPGK

SEQ ID NO: 494 - protein, 213 aa, synthetic construct; identical to SEQ ID NO: 467

SEQ ID NO: 495 - protein, 447 aa, synthetic construct; identical to SEQ ID NO: 465

SEQ ID NO: 496 - protein, 485 aa, synthetic construct; identical to SEQ ID NO: 33

SEQ ID NO: 497 - protein, 213 aa, synthetic construct
EIVLTQSPATLSLSPGERATLSCRASQSVSSYLAWYQQKPGQAPRLLIYDASNRATGIPARFSGSGSGTDFTLTISSLEPEDFAVYYCQQRSTWLTFGGGTKVDIKRTVAAPSVFIFPPSDEQLKSGTASVVCLLNNFYPREAKVQWKVDNALQSGNSQESVTEQDSKDSTYSLSSTLTLSKADYEKHKVYACEVTHQGLSSPVTKSFNRGEC

SEQ ID NO: 498 - protein, 447 aa, synthetic construct; identical to SEQ ID NO: 465

SEQ ID NO: 499 - protein, 485 aa, synthetic construct; identical to SEQ ID NO: 403

SEQ ID NO: 500 - protein, 213 aa, synthetic construct; identical to SEQ ID NO: 497

SEQ ID NO: 501 - protein, 447 aa, synthetic construct; identical to SEQ ID NO: 465

SEQ ID NO: 502 - protein, 720 aa, synthetic construct; identical to SEQ ID NO: 472

SEQ ID NO: 503 - protein, 213 aa, synthetic construct; identical to SEQ ID NO: 497

SEQ ID NO: 504 - protein, 447 aa, synthetic construct; identical to SEQ ID NO: 465

SEQ ID NO: 505 - protein, 720 aa, synthetic construct; identical to SEQ ID NO: 472

SEQ ID NO: 506 - protein, 213 aa, synthetic construct; identical to SEQ ID NO: 497

SEQ ID NO: 507 - protein, 447 aa, synthetic construct; identical to SEQ ID NO: 465

SEQ ID NO: 508 - protein, 720 aa, synthetic construct; identical to SEQ ID NO: 478

SEQ ID NO: 509 - protein, 213 aa, synthetic construct; identical to SEQ ID NO: 497

SEQ ID NO: 510 - protein, 447 aa, synthetic construct; identical to SEQ ID NO: 480

SEQ ID NO: 511 - protein, 485 aa, synthetic construct; identical to SEQ ID NO: 421

SEQ ID NO: 512 - protein, 213 aa, synthetic construct; identical to SEQ ID NO: 497

SEQ ID NO: 513 - protein, 447 aa, synthetic construct; identical to SEQ ID NO: 480

SEQ ID NO: 514 - protein, 485 aa, synthetic construct; identical to SEQ ID NO: 424

SEQ ID NO: 515 - protein, 213 aa, synthetic construct; identical to SEQ ID NO: 497

SEQ ID NO: 516 - protein, 447 aa, synthetic construct; identical to SEQ ID NO: 480

SEQ ID NO: 517 - protein, 720 aa, synthetic construct; identical to SEQ ID NO: 487

SEQ ID NO: 518 - protein, 213 aa, synthetic construct; identical to SEQ ID NO: 497

SEQ ID NO: 519 - protein, 447 aa, synthetic construct; identical to SEQ ID NO: 480

SEQ ID NO: 520 - protein, 720 aa, synthetic construct; identical to SEQ ID NO: 487

SEQ ID NO: 521 - protein, 213 aa, synthetic construct; identical to SEQ ID NO: 497

SEQ ID NO: 522 - protein, 447 aa, synthetic construct; identical to SEQ ID NO: 480

SEQ ID NO: 523 - protein, 720 aa, synthetic construct; identical to SEQ ID NO: 493

SEQ ID NO: 524 - protein, 213 aa, synthetic construct; identical to SEQ ID NO: 497

SEQ ID NO: 525 - protein, 452 aa, synthetic construct
QVQLQESGPGLVKPSETLSLTCNVSGGSISTYYWNWLRQPPGKGLEWIGSIYYSGTTNYNPSLKSRVTISVDTSKHQFSLRLTSVTAADTAVYFCARDQGYYHGSGSYFFDYWGQGTLVTVSSASTKGPSVFPLAPSSKSTSGGTAALGCLVKDYFPEPVTVSWNSGALTSGVHTFPAVLQSSGLYSLSSVVTVPSSSLGTQTYICNVNHKPSDTKVDKKVEPKSCDKTHTCPPCPAPPVAGPSVFLFPPKPKDTLMISRTPEVTCVVVDVKHEDPEVKFNWYVDGVEVHNAKTKPREEEYNSTYRVVSVLTVLHQDWLNGKEYKCKVSNKALPAPIEKTISKAKGQPREPQVYTLPPSREEMTKNQVSLTCDVSGFYPSDIAVEWESDGQPENNYKTTPPVLDSDGSFFLYSKLTVDKSRWEQGDVFSCSVMHEALHNHYTQKSLSLSPGK

SEQ ID NO: 526 - protein, 485 aa, synthetic construct; identical to SEQ ID NO: 33

SEQ ID NO: 527 - protein, 214 aa, synthetic construct
EIVMTQSPATLSVSPGERATLSCRASQSVSSHLAWYQQKPGQAPRLLIYGASTRATGIPARFSGSGSGTEFTLTISSLQSEDFAIFYCQQYNNWPLTFGGGTKVDIKRTVAAPSVFIFPPSDEQLKSGTASVVCLLNNFYPREAKVQWKVDNALQSGNSQESVTEQDSKDSTYSLSSTLTLSKADYEKHKVYACEVTHQGLSSPVTKSFNRGEC

SEQ ID NO: 528 - protein, 452 aa, synthetic construct; identical to SEQ ID NO: 525

SEQ ID NO: 529 - protein, 485 aa, synthetic construct; identical to SEQ ID NO: 403

SEQ ID NO: 530 - protein, 214 aa, synthetic construct; identical to SEQ ID NO: 527

SEQ ID NO: 531 - protein, 452 aa, synthetic construct; identical to SEQ ID NO: 525

SEQ ID NO: 532 - protein, 725 aa, synthetic construct
QVQLQESGPGLVKPSETLSLTCNVSGGSISTYYWNWLRQPPGKGLEWIGSIYYSGTTNYNPSLKSRVTISVDTSKHQFSLRLTSVTAADTAVYFCARDQGYYHGSGSYFFDYWGQGTLVTVSSASTKGPSVFPLAPSSKSTSGGTAALGCLVKDYFPEPVTVSWNSGALTSGVHTFPAVLQSSGLYSLSSVVTVPSSSLGTQTYICNVNHKPSNTKVDKKVEPKSCGGGGSGGGGSEVQLVESGGGLVQPGGSLRLSCAASGFTFSTYAMNWVRQAPGKGLEWVGRIRSKYNNYATYYADSVKGRFTISRDDSKNTLYLQMNSLRAEDTAVYYCVRHGNFGDSYVSWFAYWGQGTLVTVSSGKPGSGKPGSGKPGSGKPGSQAVVTQEPSLTVSPGGTVTLTCGSSTGAVTTSNYANWVQQKPGKSPRGLIGGTNKRAPGVPARFSGSLLGGKAALTISGAQPEDEADYYCALWYSNHWVFGGGTKLTVLGGGGSGGGGSKTHTCPPCPAPPVAGPSVFLFPPKPKDTLMISRTPEVTCVVVDVKHEDPEVKFNWYVDGVEVHNAKTKPREEQYNSTYRVVSVLTVLHQDWLNGKEYKCKVSNKALPAPIEKTISKAKGQPREPQVYTLPPSREQMTKNQVKLTCLVKGFYPSDIAVEWESNGQPENNYKTTPPVLDSDGSFFLYSKLTVDKSRWQQGNVFSCSVMHEALHNHYTQKSLSLSPGK

SEQ ID NO: 533 - protein, 214 aa, synthetic construct; identical to SEQ ID NO: 527

SEQ ID NO: 534 - protein, 452 aa, synthetic construct; identical to SEQ ID NO: 525

SEQ ID NO: 535 - protein, 725 aa, synthetic construct; identical to SEQ ID NO: 532

SEQ ID NO: 536 - protein, 214 aa, synthetic construct; identical to SEQ ID NO: 527

SEQ ID NO: 537 - protein, 452 aa, synthetic construct; identical to SEQ ID NO: 525

SEQ ID NO: 538 - protein, 725 aa, synthetic construct
QVQLQESGPGLVKPSETLSLTCNVSGGSISTYYWNWLRQPPGKGLEWIGSIYYSGTTNYNPSLKSRVTISVDTSKHQFSLRLTSVTAADTAVYFCARDQGYYHGSGSYFFDYWGQGTLVTVSSASTKGPSVFPLAPSSKSTSGGTAALGCLVKDYFPEPVTVSWNSGALTSGVHTFPAVLQSSGLYSLSSVVTVPSSSLGTQTYICNVNHKPSNTKVDKKVEPKSCGGGGSGGGGSQAVVTQEPSLTVSPGGTVTLTCGSSTGAVTTSNYANWVQQKPGKSPRGLIGGTNKRAPGVPARFSGSLLGGKAALTISGAQPEDEADYYCALWYSNHWVFGGGTKLTVLGKPGSGKPGSGKPGSGKPGSEVQLVESGGGLVQPGGSLRLSCAASGFTFSTYAMNWVRQAPGKGLEWVGRIRSKANNYATYYADSVKGRFTISRDDSKNTLYLQMNSLRAEDTAVYYCVRHGNFGDSYVSWFAYWGQGTLVTVSSGGGGSGGGGSKTHTCPPCPAPPVAGPSVFLFPPKPKDTLMISRTPEVTCVVVDVKHEDPEVKFNWYVDGVEVHNAKTKPREEQYNSTYRVVSVLTVLHQDWLNGKEYKCKVSNKALPAPIEKTISKAKGQPREPQVYTLPPSREQMTKNQVKLTCLVKGFYPSDIAVEWESNGQPENNYKTTPPVLDSDGSFFLYSKLTVDKSRWQQGNVFSCSVMHEALHNHYTQKSLSLSPGK

SEQ ID NO: 539 - protein, 214 aa, synthetic construct; identical to SEQ ID NO: 527

SEQ ID NO: 540 - protein, 452 aa, synthetic construct
QVQLQESGPGLVKPSETLSLTCNVSGGSISTYYWNWLRQPPGKGLEWIGSIYYSGTTNYNPSLKSRVTISVDTSKHQFSLRLTSVTAADTAVYFCARDQGYYHGSGSYFFDYWGQGTLVTVSSASTKGPSVFPLAPSSKSTSGGTAALGCLVKDYFPEPVTVSWNSGALTSGVHTFPAVLQSSGLYSLSSVVTVPSSSLGTQTYICNVNHKPSDTKVDKKVEPKSCDKTHTCPPCPAPPVAGPSVFLFPPKPKDTLMISRTPEVTCVVVDVKHEDPEVKFNWYVDGVEVHNAKTKPREEEYNSTYRVVSVLTVLHQDWLNGKEYKCKVSNKALPAPIEKTISKAKGQPREPQVYTLPPSREEMTKNQVSLTCDVSGFYPSDIAVEWESDGQPENNYKTTPPVLDSDGSFFLYSKLTVDKSRWEQGDVFSCSVLHEALHSHYTQKSLSLSPGK

SEQ ID NO: 541 - protein, 485 aa, synthetic construct; identical to SEQ ID NO: 421

SEQ ID NO: 542 - protein, 214 aa, synthetic construct; identical to SEQ ID NO: 527

SEQ ID NO: 543 - protein, 452 aa, synthetic construct; identical to SEQ ID NO: 540

SEQ ID NO: 544 - protein, 485 aa, synthetic construct; identical to SEQ ID NO: 424

SEQ ID NO: 545 - protein, 214 aa, synthetic construct; identical to SEQ ID NO: 527

SEQ ID NO: 546 - protein, 452 aa, synthetic construct; identical to SEQ ID NO: 540

SEQ ID NO: 547 - protein, 725 aa, synthetic construct
QVQLQESGPGLVKPSETLSLTCNVSGGSISTYYWNWLRQPPGKGLEWIGSIYYSGTTNYNPSLKSRVTISVDTSKHQFSLRLTSVTAADTAVYFCARDQGYYHGSGSYFFDYWGQGTLVTVSSASTKGPSVFPLAPSSKSTSGGTAALGCLVKDYFPEPVTVSWNSGALTSGVHTFPAVLQSSGLYSLSSVVTVPSSSLGTQTYICNVNHKPSNTKVDKKVEPKSCGGGGSGGGGSEVQLVESGGGLVQPGGSLRLSCAASGFTFSTYAMNWVRQAPGKGLEWVGRIRSKYNNYATYYADSVKGRFTISRDDSKNTLYLQMNSLRAEDTAVYYCVRHGNFGDSYVSWFAYWGQGTLVTVSSGKPGSGKPGSGKPGSGKPGSQAVVTQEPSLTVSPGGTVTLTCGSSTGAVTTSNYANWVQQKPGKSPRGLIGGTNKRAPGVPARFSGSLLGGKAALTISGAQPEDEADYYCALWYSNHWVFGGGTKLTVLGGGGSGGGGSKTHTCPPCPAPPVAGPSVFLFPPKPKDTLMISRTPEVTCVVVDVKHEDPEVKFNWYVDGVEVHNAKTKPREEQYNSTYRVVSVLTVLHQDWLNGKEYKCKVSNKALPAPIEKTISKAKGQPREPQVYTLPPSREQMTKNQVKLTCLVKGFYPSDIAVEWESNGQPENNYKTTPPVLDSDGSFFLYSKLTVDKSRWQQGNVFSCSVLHEALHSHYTQKSLSLSPGK

SEQ ID NO: 548 - protein, 214 aa, synthetic construct; identical to SEQ ID NO: 527

SEQ ID NO: 549 - protein, 452 aa, synthetic construct; identical to SEQ ID NO: 540

SEQ ID NO: 550 - protein, 725 aa, synthetic construct; identical to SEQ ID NO: 547

SEQ ID NO: 551 - protein, 214 aa, synthetic construct; identical to SEQ ID NO: 527

SEQ ID NO: 552 - protein, 452 aa, synthetic construct; identical to SEQ ID NO: 540

SEQ ID NO: 553 - protein, 725 aa, synthetic construct
QVQLQESGPGLVKPSETLSLTCNVSGGSISTYYWNWLRQPPGKGLEWIGSIYYSGTTNYNPSLKSRVTISVDTSKHQFSLRLTSVTAADTAVYFCARDQGYYHGSGSYFFDYWGQGTLVTVSSASTKGPSVFPLAPSSKSTSGGTAALGCLVKDYFPEPVTVSWNSGALTSGVHTFPAVLQSSGLYSLSSVVTVPSSSLGTQTYICNVNHKPSNTKVDKKVEPKSCGGGGSGGGGSQAVVTQEPSLTVSPGGTVTLTCGSSTGAVTTSNYANWVQQKPGKSPRGLIGGTNKRAPGVPARFSGSLLGGKAALTISGAQPEDEADYYCALWYSNHWVFGGGTKLTVLGKPGSGKPGSGKPGSGKPGSEVQLVESGGGLVQPGGSLRLSCAASGFTFSTYAMNWVRQAPGKGLEWVGRIRSKANNYATYYADSVKGRFTISRDDSKNTLYLQMNSLRAEDTAVYYCVRHGNFGDSYVSWFAYWGQGTLVTVSSGGGGSGGGGSKTHTCPPCPAPPVAGPSVFLFPPKPKDTLMISRTPEVTCVVVDVKHEDPEVKFNWYVDGVEVHNAKTKPREEQYNSTYRVVSVLTVLHQDWLNGKEYKCKVSNKALPAPIEKTISKAKGQPREPQVYTLPPSREQMTKNQVKLTCLVKGFYPSDIAVEWESNGQPENNYKTTPPVLDSDGSFFLYSKLTVDKSRWQQGNVFSCSVLHEALHSHYTQKSLSLSPGK

SEQ ID NO: 554 - protein, 214 aa, synthetic construct; identical to SEQ ID NO: 527

SEQ ID NO: 555 - protein, 447 aa, synthetic construct
QVQLQESGPGLVKPSGTLSLTCAVSGGSIRSSNWWSWVRQPPGKGLEWIGEIYHGGTTNNNPSLKSRVTISVDQSKSQFSLKLSSVTAADTAVYYCARHRYSSGLDYWGQGTLVTVSSASTKGPSVFPLAPSSKSTSGGTAALGCLVKDYFPEPVTVSWNSGALTSGVHTFPAVLQSSGLYSLSSVVTVPSSSLGTQTYICNVNHKPSDTKVDKKVEPKSCDKTHTCPPCPAPPVAGPSVFLFPPKPKDTLMISRTPEVTCVVVDVKHEDPEVKFNWYVDGVEVHNAKTKPREEEYNSTYRVVSVLTVLHQDWLNGKEYKCKVSNKALPAPIEKTISKAKGQPREPQVYTLPPSREEMTKNQVSLTCDVSGFYPSDIAVEWESDGQPENNYKTTPPVLDSDGSFFLYSKLTVDKSRWEQGDVFSCSVMHEALHNHYTQKSLSLSPGK

SEQ ID NO: 556 - protein, 485 aa, synthetic construct; identical to SEQ ID NO: 33

SEQ ID NO: 557 - protein, 213 aa, synthetic construct
DIQMTQTPSTLSASVGDRVTITCRGSHSISNWLGWYRHKPRKAPNLLIYKASSLKSGVPSRFSGSGSGTEFTLTITSLQPDDFATYYCQQYNHYSTFGQGTKVDIKRTVAAPSVFIFPPSDEQLKSGTASVVCLLNNFYPREAKVQWKVDNALQSGNSQESVTEQDSKDSTYSLSSTLTLSKADYEKHKVYACEVTHQGLSSPVTKSFNRGEC

SEQ ID NO: 558 - protein, 447 aa, synthetic construct; identical to SEQ ID NO: 555

SEQ ID NO: 559 - protein, 485 aa, synthetic construct; identical to SEQ ID NO: 403

SEQ ID NO: 560 - protein, 213 aa, synthetic construct; identical to SEQ ID NO: 557

SEQ ID NO: 561 - protein, 447 aa, synthetic construct; identical to SEQ ID NO: 555

SEQ ID NO: 562 - protein, 720 aa, synthetic construct
QVQLQESGPGLVKPSGTLSLTCAVSGGSIRSSNWWSWVRQPPGKGLEWIGEIYHGGTTNNNPSLKSRVTISVDQSKSQFSLKLSSVTAADTAVYYCARHRYSSGLDYWGQGTLVTVSSASTKGPSVFPLAPSSKSTSGGTAALGCLVKDYFPEPVTVSWNSGALTSGVHTFPAVLQSSGLYSLSSVVTVPSSSLGTQTYICNVNHKPSNTKVDKKVEPKSCGGGGSGGGGSEVQLVESGGGLVQPGGSLRLSCAASGFTFSTYAMNWVRQAPGKGLEWVGRIRSKYNNYATYYADSVKGRFTISRDDSKNTLYLQMNSLRAEDTAVYYCVRHGNFGDSYVSWFAYWGQGTLVTVSSGKPGSGKPGSGKPGSGKPGSQAVVTQEPSLTVSPGGTVTLTCGSSTGAVTTSNYANWVQQKPGKSPRGLIGGTNKRAPGVPARFSGSLLGGKAALTISGAQPEDEADYYCALWYSNHWVFGGGTKLTVLGGGGSGGGGSKTHTCPPCPAPPVAGPSVFLFPPKPKDTLMISRTPEVTCVVVDVKHEDPEVKFNWYVDGVEVHNAKTKPREEQYNSTYRVVSVLTVLHQDWLNGKEYKCKVSNKALPAPIEKTISKAKGQPREPQVYTLPPSREQMTKNQVKLTCLVKGFYPSDIAVEWESNGQPENNYKTTPPVLDSDGSFFLYSKLTVDKSRWQQGNVFSCSVMHEALHNHYTQKSLSLSPGK

SEQ ID NO: 563 - protein, 213 aa, synthetic construct; identical to SEQ ID NO: 557

SEQ ID NO: 564 - protein, 447 aa, synthetic construct; identical to SEQ ID NO: 555

SEQ ID NO: 565 - protein, 720 aa, synthetic construct; identical to SEQ ID NO: 562

SEQ ID NO: 566 - protein, 213 aa, synthetic construct; identical to SEQ ID NO: 557

SEQ ID NO: 567 - protein, 447 aa, synthetic construct; identical to SEQ ID NO: 555

SEQ ID NO: 568 - protein, 720 aa, synthetic construct
QVQLQESGPGLVKPSGTLSLTCAVSGGSIRSSNWWSWVRQPPGKGLEWIGEIYHGGTTNNNPSLKSRVTISVDQSKSQFSLKLSSVTAADTAVYYCARHRYSSGLDYWGQGTLVTVSSASTKGPSVFPLAPSSKSTSGGTAALGCLVKDYFPEPVTVSWNSGALTSGVHTFPAVLQSSGLYSLSSVVTVPSSSLGTQTYICNVNHKPSNTKVDKKVEPKSCGGGGSGGGGSQAVVTQEPSLTVSPGGTVTLTCGSSTGAVTTSNYANWVQQKPGKSPRGLIGGTNKRAPGVPARFSGSLLGGKAALTISGAQPEDEADYYCALWYSNHWVFGGGTKLTVLGKPGSGKPGSGKPGSGKPGSEVQLVESGGGLVQPGGSLRLSCAASGFTFSTYAMNWVRQAPGKGLEWVGRIRSKANNYATYYADSVKGRFTISRDDSKNTLYLQMNSLRAEDTAVYYCVRHGNFGDSYVSWFAYWGQGTLVTVSSGGGGSGGGGSKTHTCPPCPAPPVAGPSVFLFPPKPKDTLMISRTPEVTCVVVDVKHEDPEVKFNWYVDGVEVHNAKTKPREEQYNSTYRVVSVLTVLHQDWLNGKEYKCKVSNKALPAPIEKTISKAKGQPREPQVYTLPPSREQMTKNQVKLTCLVKGFYPSDIAVEWESNGQPENNYKTTPPVLDSDGSFFLYSKLTVDKSRWQQGNVFSCSVMHEALHNHYTQKSLSLSPGK

SEQ ID NO: 569 - protein, 213 aa, synthetic construct; identical to SEQ ID NO: 557

SEQ ID NO: 570 - protein, 447 aa, synthetic construct
QVQLQESGPGLVKPSGTLSLTCAVSGGSIRSSNWWSWVRQPPGKGLEWIGEIYHGGTTNNNPSLKSRVTISVDQSKSQFSLKLSSVTAADTAVYYCARHRYSSGLDYWGQGTLVTVSSASTKGPSVFPLAPSSKSTSGGTAALGCLVKDYFPEPVTVSWNSGALTSGVHTFPAVLQSSGLYSLSSVVTVPSSSLGTQTYICNVNHKPSDTKVDKKVEPKSCDKTHTCPPCPAPPVAGPSVFLFPPKPKDTLMISRTPEVTCVVVDVKHEDPEVKFNWYVDGVEVHNAKTKPREEEYNSTYRVVSVLTVLHQDWLNGKEYKCKVSNKALPAPIEKTISKAKGQPREPQVYTLPPSREEMTKNQVSLTCDVSGFYPSDIAVEWESDGQPENNYKTTPPVLDSDGSFFLYSKLTVDKSRWEQGDVFSCSVLHEALHSHYTQKSLSLSPGK

SEQ ID NO: 571 - protein, 485 aa, synthetic construct; identical to SEQ ID NO: 421

SEQ ID NO: 572 - protein, 213 aa, synthetic construct; identical to SEQ ID NO: 557

SEQ ID NO: 573 - protein, 447 aa, synthetic construct; identical to SEQ ID NO: 570

SEQ ID NO: 574 - protein, 485 aa, synthetic construct; identical to SEQ ID NO: 424

SEQ ID NO: 575 - protein, 213 aa, synthetic construct; identical to SEQ ID NO: 557

SEQ ID NO: 576 - protein, 447 aa, synthetic construct; identical to SEQ ID NO: 570

SEQ ID NO: 577 - protein, 720 aa, synthetic construct
QVQLQESGPGLVKPSGTLSLTCAVSGGSIRSSNWWSWVRQPPGKGLEWIGEIYHGGTTNNNPSLKSRVTISVDQSKSQFSLKLSSVTAADTAVYYCARHRYSSGLDYWGQGTLVTVSSASTKGPSVFPLAPSSKSTSGGTAALGCLVKDYFPEPVTVSWNSGALTSGVHTFPAVLQSSGLYSLSSVVTVPSSSLGTQTYICNVNHKPSNTKVDKKVEPKSCGGGGSGGGGSEVQLVESGGGLVQPGGSLRLSCAASGFTFSTYAMNWVRQAPGKGLEWVGRIRSKYNNYATYYADSVKGRFTISRDDSKNTLYLQMNSLRAEDTAVYYCVRHGNFGDSYVSWFAYWGQGTLVTVSSGKPGSGKPGSGKPGSGKPGSQAVVTQEPSLTVSPGGTVTLTCGSSTGAVTTSNYANWVQQKPGKSPRGLIGGTNKRAPGVPARFSGSLLGGKAALTISGAQPEDEADYYCALWYSNHWVFGGGTKLTVLGGGGSGGGGSKTHTCPPCPAPPVAGPSVFLFPPKPKDTLMISRTPEVTCVVVDVKHEDPEVKFNWYVDGVEVHNAKTKPREEQYNSTYRVVSVLTVLHQDWLNGKEYKCKVSNKALPAPIEKTISKAKGQPREPQVYTLPPSREQMTKNQVKLTCLVKGFYPSDIAVEWESNGQPENNYKTTPPVLDSDGSFFLYSKLTVDKSRWQQGNVFSCSVLHEALHSHYTQKSLSLSPGK

SEQ ID NO: 578 - protein, 213 aa, synthetic construct; identical to SEQ ID NO: 557

SEQ ID NO: 579 - protein, 447 aa, synthetic construct; identical to SEQ ID NO: 570

SEQ ID NO: 580 - protein, 720 aa, synthetic construct; identical to SEQ ID NO: 577

SEQ ID NO: 581 - protein, 213 aa, synthetic construct; identical to SEQ ID NO: 557

SEQ ID NO: 582 - protein, 447 aa, synthetic construct; identical to SEQ ID NO: 570

SEQ ID NO: 583 - protein, 720 aa, synthetic construct
QVQLQESGPGLVKPSGTLSLTCAVSGGSIRSSNWWSWVRQPPGKGLEWIGEIYHGGTTNNNPSLKSRVTISVDQSKSQFSLKLSSVTAADTAVYYCARHRYSSGLDYWGQGTLVTVSSASTKGPSVFPLAPSSKSTSGGTAALGCLVKDYFPEPVTVSWNSGALTSGVHTFPAVLQSSGLYSLSSVVTVPSSSLGTQTYICNVNHKPSNTKVDKKVEPKSCGGGGSGGGGSQAVVTQEPSLTVSPGGTVTLTCGSSTGAVTTSNYANWVQQKPGKSPRGLIGGTNKRAPGVPARFSGSLLGGKAALTISGAQPEDEADYYCALWYSNHWVFGGGTKLTVLGKPGSGKPGSGKPGSGKPGSEVQLVESGGGLVQPGGSLRLSCAASGFTFSTYAMNWVRQAPGKGLEWVGRIRSKANNYATYYADSVKGRFTISRDDSKNTLYLQMNSLRAEDTAVYYCVRHGNFGDSYVSWFAYWGQGTLVTVSSGGGGSGGGGSKTHTCPPCPAPPVAGPSVFLFPPKPKDTLMISRTPEVTCVVVDVKHEDPEVKFNWYVDGVEVHNAKTKPREEQYNSTYRVVSVLTVLHQDWLNGKEYKCKVSNKALPAPIEKTISKAKGQPREPQVYTLPPSREQMTKNQVKLTCLVKGFYPSDIAVEWESNGQPENNYKTTPPVLDSDGSFFLYSKLTVDKSRWQQGNVFSCSVLHEALHSHYTQKSLSLSPGK

SEQ ID NO: 584 - protein, 213 aa, synthetic construct; identical to SEQ ID NO: 557

SEQ ID NO: 585 - protein, 454 aa, synthetic construct
EVQLLESGGGLVQPGGSLRLSCAASGFTFSSYAMNWVRQAPGKGLEWVSGISGSGGSTYYADSVKGRFTFSRDNSKNTLYLQMISLRAEDTAVYYCAKDQRITMVRGVIGAFDIWGQGTMVTVSSASTKGPSVFPLAPSSKSTSGGTAALGCLVKDYFPEPVTVSWNSGALTSGVHTFPAVLQSSGLYSLSSVVTVPSSSLGTQTYICNVNHKPSDTKVDKKVEPKSCDKTHTCPPCPAPPVAGPSVFLFPPKPKDTLMISRTPEVTCVVVDVKHEDPEVKFNWYVDGVEVHNAKTKPREEEYNSTYRVVSVLTVLHQDWLNGKEYKCKVSNKALPAPIEKTISKAKGQPREPQVYTLPPSREEMTKNQVSLTCDVSGFYPSDIAVEWESDGQPENNYKTTPPVLDSDGSFFLYSKLTVDKSRWEQGDVFSCSVMHEALHNHYTQKSLSLSPGK

SEQ ID NO: 586 - protein, 485 aa, synthetic construct; identical to SEQ ID NO: 33

SEQ ID NO: 587 - protein, 213 aa, synthetic construct
DIQMTQSPSTLSASVGDRVTITCRASQSISSWLAWYQQKPGKAPKLLIYKASSLESGVPSRFSGSGSGTEFTLTISSLQPDDFATYYCQQYVGLITFGQGTRLEIKRTVAAPSVFIFPPSDEQLKSGTASVVCLLNNFYPREAKVQWKVDNALQSGNSQESVTEQDSKDSTYSLSSTLTLSKADYEKHKVYACEVTHQGLSSPVTKSFNRGEC

SEQ ID NO: 588 - protein, 454 aa, synthetic construct; identical to SEQ ID NO: 585

SEQ ID NO: 589 - protein, 485 aa, synthetic construct; identical to SEQ ID NO: 403

SEQ ID NO: 590 - protein, 213 aa, synthetic construct; identical to SEQ ID NO: 587

SEQ ID NO: 591 - protein, 454 aa, synthetic construct; identical to SEQ ID NO: 585

SEQ ID NO: 592 - protein, 727 aa, synthetic construct
EVQLLESGGGLVQPGGSLRLSCAASGFTFSSYAMNWVRQAPGKGLEWVSGISGSGGSTYYADSVKGRFTFSRDNSKNTLYLQMISLRAEDTAVYYCAKDQRITMVRGVIGAFDIWGQGTMVTVSSASTKGPSVFPLAPSSKSTSGGTAALGCLVKDYFPEPVTVSWNSGALTSGVHTFPAVLQSSGLYSLSSVVTVPSSSLGTQTYICNVNHKPSNTKVDKKVEPKSCGGGGSGGGGSEVQLVESGGGLVQPGGSLRLSCAASGFTFSTYAMNWVRQAPGKGLEWVGRIRSKYNNYATYYADSVKGRFTISRDDSKNTLYLQMNSLRAEDTAVYYCVRHGNFGDSYVSWFAYWGQGTLVTVSSGKPGSGKPGSGKPGSGKPGSQAVVTQEPSLTVSPGGTVTLTCGSSTGAVTTSNYANWVQQKPGKSPRGLIGGTNKRAPGVPARFSGSLLGGKAALTISGAQPEDEADYYCALWYSNHWVFGGGTKLTVLGGGGSGGGGSKTHTCPPCPAPPVAGPSVFLFPPKPKDTLMISRTPEVTCVVVDVKHEDPEVKFNWYVDGVEVHNAKTKPREEQYNSTYRVVSVLTVLHQDWLNGKEYKCKVSNKALPAPIEKTISKAKGQPREPQVYTLPPSREQMTKNQVKLTCLVKGFYPSDIAVEWESNGQPENNYKTTPPVLDSDGSFFLYSKLTVDKSRWQQGNVFSCSVMHEALHNHYTQKSLSLSPGK

SEQ ID NO: 593 - protein, 213 aa, synthetic construct; identical to SEQ ID NO: 587

SEQ ID NO: 594 - protein, 454 aa, synthetic construct; identical to SEQ ID NO: 585

SEQ ID NO: 595 - protein, 727 aa, synthetic construct; identical to SEQ ID NO: 592

SEQ ID NO: 596 - protein, 213 aa, synthetic construct; identical to SEQ ID NO: 587

SEQ ID NO: 597 - protein, 454 aa, synthetic construct; identical to SEQ ID NO: 585

SEQ ID NO: 598 - protein, 727 aa, synthetic construct
EVQLLESGGGLVQPGGSLRLSCAASGFTFSSYAMNWVRQAPGKGLEWVSGISGSGGSTYYADSVKGRFTFSRDNSKNTLYLQMISLRAEDTAVYYCAKDQRITMVRGVIGAFDIWGQGTMVTVSSASTKGPSVFPLAPSSKSTSGGTAALGCLVKDYFPEPVTVSWNSGALTSGVHTFPAVLQSSGLYSLSSVVTVPSSSLGTQTYICNVNHKPSNTKVDKKVEPKSCGGGGSGGGGSQAVVTQEPSLTVSPGGTVTLTCGSSTGAVTTSNYANWVQQKPGKSPRGLIGGTNKRAPGVPARFSGSLLGGKAALTISGAQPEDEADYYCALWYSNHWVFGGGTKLTVLGKPGSGKPGSGKPGSGKPGSEVQLVESGGGLVQPGGSLRLSCAASGFTFSTYAMNWVRQAPGKGLEWVGRIRSKANNYATYYADSVKGRFTISRDDSKNTLYLQMNSLRAEDTAVYYCVRHGNFGDSYVSWFAYWGQGTLVTVSSGGGGSGGGGSKTHTCPPCPAPPVAGPSVFLFPPKPKDTLMISRTPEVTCVVVDVKHEDPEVKFNWYVDGVEVHNAKTKPREEQYNSTYRVVSVLTVLHQDWLNGKEYKCKVSNKALPAPIEKTISKAKGQPREPQVYTLPPSREQMTKNQVKLTCLVKGFYPSDIAVEWESNGQPENNYKTTPPVLDSDGSFFLYSKLTVDKSRWQQGNVFSCSVMHEALHNHYTQKSLSLSPGK

SEQ ID NO: 599 - protein, 213 aa, synthetic construct; identical to SEQ ID NO: 587

SEQ ID NO: 600 - protein, 454 aa, synthetic construct
EVQLLESGGGLVQPGGSLRLSCAASGFTFSSYAMNWVRQAPGKGLEWVSGISGSGGSTYYADSVKGRFTFSRDNSKNTLYLQMISLRAEDTAVYYCAKDQRITMVRGVIGAFDIWGQGTMVTVSSASTKGPSVFPLAPSSKSTSGGTAALGCLVKDYFPEPVTVSWNSGALTSGVHTFPAVLQSSGLYSLSSVVTVPSSSLGTQTYICNVNHKPSDTKVDKKVEPKSCDKTHTCPPCPAPPVAGPSVFLFPPKPKDTLMISRTPEVTCVVVDVKHEDPEVKFNWYVDGVEVHNAKTKPREEEYNSTYRVVSVLTVLHQDWLNGKEYKCKVSNKALPAPIEKTISKAKGQPREPQVYTLPPSREEMTKNQVSLTCDVSGFYPSDIAVEWESDGQPENNYKTTPPVLDSDGSFFLYSKLTVDKSRWEQGDVFSCSVLHEALHSHYTQKSLSLSPGK

SEQ ID NO: 601 - protein, 485 aa, synthetic construct; identical to SEQ ID NO: 421

SEQ ID NO: 602 - protein, 213 aa, synthetic construct; identical to SEQ ID NO: 587

SEQ ID NO: 603 - protein, 454 aa, synthetic construct; identical to SEQ ID NO: 600

SEQ ID NO: 604 - protein, 485 aa, synthetic construct; identical to SEQ ID NO: 424

SEQ ID NO: 605 - protein, 213 aa, synthetic construct; identical to SEQ ID NO: 587

SEQ ID NO: 606 - protein, 454 aa, synthetic construct; identical to SEQ ID NO: 600

SEQ ID NO: 607 - protein, 727 aa, synthetic construct
EVQLLESGGGLVQPGGSLRLSCAASGFTFSSYAMNWVRQAPGKGLEWVSGISGSGGSTYYADSVKGRFTFSRDNSKNTLYLQMISLRAEDTAVYYCAKDQRITMVRGVIGAFDIWGQGTMVTVSSASTKGPSVFPLAPSSKSTSGGTAALGCLVKDYFPEPVTVSWNSGALTSGVHTFPAVLQSSGLYSLSSVVTVPSSSLGTQTYICNVNHKPSNTKVDKKVEPKSCGGGGSGGGGSEVQLVESGGGLVQPGGSLRLSCAASGFTFSTYAMNWVRQAPGKGLEWVGRIRSKYNNYATYYADSVKGRFTISRDDSKNTLYLQMNSLRAEDTAVYYCVRHGNFGDSYVSWFAYWGQGTLVTVSSGKPGSGKPGSGKPGSGKPGSQAVVTQEPSLTVSPGGTVTLTCGSSTGAVTTSNYANWVQQKPGKSPRGLIGGTNKRAPGVPARFSGSLLGGKAALTISGAQPEDEADYYCALWYSNHWVFGGGTKLTVLGGGGSGGGGSKTHTCPPCPAPPVAGPSVFLFPPKPKDTLMISRTPEVTCVVVDVKHEDPEVKFNWYVDGVEVHNAKTKPREEQYNSTYRVVSVLTVLHQDWLNGKEYKCKVSNKALPAPIEKTISKAKGQPREPQVYTLPPSREQMTKNQVKLTCLVKGFYPSDIAVEWESNGQPENNYKTTPPVLDSDGSFFLYSKLTVDKSRWQQGNVFSCSVLHEALHSHYTQKSLSLSPGK

SEQ ID NO: 608 - protein, 213 aa, synthetic construct; identical to SEQ ID NO: 587

SEQ ID NO: 609 - protein, 454 aa, synthetic construct; identical to SEQ ID NO: 600

SEQ ID NO: 610 - protein, 727 aa, synthetic construct; identical to SEQ ID NO: 607

SEQ ID NO: 611 - protein, 213 aa, synthetic construct; identical to SEQ ID NO: 587

SEQ ID NO: 612 - protein, 454 aa, synthetic construct; identical to SEQ ID NO: 600

SEQ ID NO: 613 - protein, 727 aa, synthetic construct
EVQLLESGGGLVQPGGSLRLSCAASGFTFSSYAMNWVRQAPGKGLEWVSGISGSGGSTYYADSVKGRFTFSRDNSKNTLYLQMISLRAEDTAVYYCAKDQRITMVRGVIGAFDIWGQGTMVTVSSASTKGPSVFPLAPSSKSTSGGTAALGCLVKDYFPEPVTVSWNSGALTSGVHTFPAVLQSSGLYSLSSVVTVPSSSLGTQTYICNVNHKPSNTKVDKKVEPKSCGGGGSGGGGSQAVVTQEPSLTVSPGGTVTLTCGSSTGAVTTSNYANWVQQKPGKSPRGLIGGTNKRAPGVPARFSGSLLGGKAALTISGAQPEDEADYYCALWYSNHWVFGGGTKLTVLGKPGSGKPGSGKPGSGKPGSEVQLVESGGGLVQPGGSLRLSCAASGFTFSTYAMNWVRQAPGKGLEWVGRIRSKANNYATYYADSVKGRFTISRDDSKNTLYLQMNSLRAEDTAVYYCVRHGNFGDSYVSWFAYWGQGTLVTVSSGGGGSGGGGSKTHTCPPCPAPPVAGPSVFLFPPKPKDTLMISRTPEVTCVVVDVKHEDPEVKFNWYVDGVEVHNAKTKPREEQYNSTYRVVSVLTVLHQDWLNGKEYKCKVSNKALPAPIEKTISKAKGQPREPQVYTLPPSREQMTKNQVKLTCLVKGFYPSDIAVEWESNGQPENNYKTTPPVLDSDGSFFLYSKLTVDKSRWQQGNVFSCSVLHEALHSHYTQKSLSLSPGK

SEQ ID NO: 614 - protein, 213 aa, synthetic construct; identical to SEQ ID NO: 587

SEQ ID NO: 615 - protein, 446 aa, synthetic construct
EVQLLESGGGLEQPGGSLRLSCAASGFTFSSHAMNWVRQAPGKGLEWVSAISGSGGSTYYADSVKGRFTISRDNSKNTLCLQMNSLRAEDTAVYYCARGHNSGWPYWGQGTLVTVSSASTKGPSVFPLAPSSKSTSGGTAALGCLVKDYFPEPVTVSWNSGALTSGVHTFPAVLQSSGLYSLSSVVTVPSSSLGTQTYICNVNHKPSDTKVDKKVEPKSCDKTHTCPPCPAPPVAGPSVFLFPPKPKDTLMISRTPEVTCVVVDVKHEDPEVKFNWYVDGVEVHNAKTKPREEEYNSTYRVVSVLTVLHQDWLNGKEYKCKVSNKALPAPIEKTISKAKGQPREPQVYTLPPSREEMTKNQVSLTCDVSGFYPSDIAVEWESDGQPENNYKTTPPVLDSDGSFFLYSKLTVDKSRWEQGDVFSCSVMHEALHNHYTQKSLSLSPGK

SEQ ID NO: 616 - protein, 485 aa, synthetic construct; identical to SEQ ID NO: 33

SEQ ID NO: 617 - protein, 214 aa, synthetic construct
DIQMTQSPSSLSASVGDRVTITCRASQSISIYLNWYQQKPGKAPKLLIYAASSLQSGVPSRCSGSGSGTDFTLTISSLQPEDFATYYCQQSYSTPLTFGGGTKVDIKRTVAAPSVFIFPPSDEQLKSGTASVVCLLNNFYPREAKVQWKVDNALQSGNSQESVTEQDSKDSTYSLSSTLTLSKADYEKHKVYACEVTHQGLSSPVTKSFNRGEC

SEQ ID NO: 618 - protein, 446 aa, synthetic construct; identical to SEQ ID NO: 615

SEQ ID NO: 619 - protein, 485 aa, synthetic construct; identical to SEQ ID NO: 403

SEQ ID NO: 620 - protein, 214 aa, synthetic construct; identical to SEQ ID NO: 617

SEQ ID NO: 621 - protein, 446 aa, synthetic construct; identical to SEQ ID NO: 615

SEQ ID NO: 622 - protein, 719 aa, synthetic construct
EVQLLESGGGLEQPGGSLRLSCAASGFTFSSHAMNWVRQAPGKGLEWVSAISGSGGSTYYADSVKGRFTISRDNSKNTLCLQMNSLRAEDTAVYYCARGHNSGWPYWGQGTLVTVSSASTKGPSVFPLAPSSKSTSGGTAALGCLVKDYFPEPVTVSWNSGALTSGVHTFPAVLQSSGLYSLSSVVTVPSSSLGTQTYICNVNHKPSNTKVDKKVEPKSCGGGGSGGGGSEVQLVESGGGLVQPGGSLRLSCAASGFTFSTYAMNWVRQAPGKGLEWVGRIRSKYNNYATYYADSVKGRFTISRDDSKNTLYLQMNSLRAEDTAVYYCVRHGNFGDSYVSWFAYWGQGTLVTVSSGKPGSGKPGSGKPGSGKPGSQAVVTQEPSLTVSPGGTVTLTCGSSTGAVTTSNYANWVQQKPGKSPRGLIGGTNKRAPGVPARFSGSLLGGKAALTISGAQPEDEADYYCALWYSNHWVFGGGTKLTVLGGGGSGGGGSKTHTCPPCPAPPVAGPSVFLFPPKPKDTLMISRTPEVTCVVVDVKHEDPEVKFNWYVDGVEVHNAKTKPREEQYNSTYRVVSVLTVLHQDWLNGKEYKCKVSNKALPAPIEKTISKAKGQPREPQVYTLPPSREQMTKNQVKLTCLVKGFYPSDIAVEWESNGQPENNYKTTPPVLDSDGSFFLYSKLTVDKSRWQQGNVFSCSVMHEALHNHYTQKSLSLSPGK

SEQ ID NO: 623 - protein, 214 aa, synthetic construct; identical to SEQ ID NO: 617

SEQ ID NO: 624 - protein, 446 aa, synthetic construct; identical to SEQ ID NO: 615

SEQ ID NO: 625 - protein, 719 aa, synthetic construct; identical to SEQ ID NO: 622

SEQ ID NO: 626 - protein, 214 aa, synthetic construct; identical to SEQ ID NO: 617

SEQ ID NO: 627 - protein, 446 aa, synthetic construct; identical to SEQ ID NO: 615

SEQ ID NO: 628 - protein, 719 aa, synthetic construct
EVQLLESGGGLEQPGGSLRLSCAASGFTFSSHAMNWVRQAPGKGLEWVSAISGSGGSTYYADSVKGRFTISRDNSKNTLCLQMNSLRAEDTAVYYCARGHNSGWPYWGQGTLVTVSSASTKGPSVFPLAPSSKSTSGGTAALGCLVKDYFPEPVTVSWNSGALTSGVHTFPAVLQSSGLYSLSSVVTVPSSSLGTQTYICNVNHKPSNTKVDKKVEPKSCGGGGSGGGGSQAVVTQEPSLTVSPGGTVTLTCGSSTGAVTTSNYANWVQQKPGKSPRGLIGGTNKRAPGVPARFSGSLLGGKAALTISGAQPEDEADYYCALWYSNHWVFGGGTKLTVLGKPGSGKPGSGKPGSGKPGSEVQLVESGGGLVQPGGSLRLSCAASGFTFSTYAMNWVRQAPGKGLEWVGRIRSKANNYATYYADSVKGRFTISRDDSKNTLYLQMNSLRAEDTAVYYCVRHGNFGDSYVSWFAYWGQGTLVTVSSGGGGSGGGGSKTHTCPPCPAPPVAGPSVFLFPPKPKDTLMISRTPEVTCVVVDVKHEDPEVKFNWYVDGVEVHNAKTKPREEQYNSTYRVVSVLTVLHQDWLNGKEYKCKVSNKALPAPIEKTISKAKGQPREPQVYTLPPSREQMTKNQVKLTCLVKGFYPSDIAVEWESNGQPENNYKTTPPVLDSDGSFFLYSKLTVDKSRWQQGNVFSCSVMHEALHNHYTQKSLSLSPGK

SEQ ID NO: 629 - protein, 214 aa, synthetic construct; identical to SEQ ID NO: 617

SEQ ID NO: 630 - protein, 446 aa, synthetic construct
EVQLLESGGGLEQPGGSLRLSCAASGFTFSSHAMNWVRQAPGKGLEWVSAISGSGGSTYYADSVKGRFTISRDNSKNTLCLQMNSLRAEDTAVYYCARGHNSGWPYWGQGTLVTVSSASTKGPSVFPLAPSSKSTSGGTAALGCLVKDYFPEPVTVSWNSGALTSGVHTFPAVLQSSGLYSLSSVVTVPSSSLGTQTYICNVNHKPSDTKVDKKVEPKSCDKTHTCPPCPAPPVAGPSVFLFPPKPKDTLMISRTPEVTCVVVDVKHEDPEVKFNWYVDGVEVHNAKTKPREEEYNSTYRVVSVLTVLHQDWLNGKEYKCKVSNKALPAPIEKTISKAKGQPREPQVYTLPPSREEMTKNQVSLTCDVSGFYPSDIAVEWESDGQPENNYKTTPPVLDSDGSFFLYSKLTVDKSRWEQGDVFSCSVLHEALHSHYTQKSLSLSPGK

SEQ ID NO: 631 - protein, 485 aa, synthetic construct; identical to SEQ ID NO: 421

SEQ ID NO: 632 - protein, 214 aa, synthetic construct; identical to SEQ ID NO: 617

SEQ ID NO: 633 - protein, 446 aa, synthetic construct; identical to SEQ ID NO: 630

SEQ ID NO: 634 - protein, 485 aa, synthetic construct; identical to SEQ ID NO: 424

SEQ ID NO: 635 - protein, 214 aa, synthetic construct; identical to SEQ ID NO: 617

SEQ ID NO: 636 - protein, 446 aa, synthetic construct; identical to SEQ ID NO: 630

SEQ ID NO: 637 - protein, 719 aa, synthetic construct
EVQLLESGGGLEQPGGSLRLSCAASGFTFSSHAMNWVRQAPGKGLEWVSAISGSGGSTYYADSVKGRFTISRDNSKNTLCLQMNSLRAEDTAVYYCARGHNSGWPYWGQGTLVTVSSASTKGPSVFPLAPSSKSTSGGTAALGCLVKDYFPEPVTVSWNSGALTSGVHTFPAVLQSSGLYSLSSVVTVPSSSLGTQTYICNVNHKPSNTKVDKKVEPKSCGGGGSGGGGSEVQLVESGGGLVQPGGSLRLSCAASGFTFSTYAMNWVRQAPGKGLEWVGRIRSKYNNYATYYADSVKGRFTISRDDSKNTLYLQMNSLRAEDTAVYYCVRHGNFGDSYVSWFAYWGQGTLVTVSSGKPGSGKPGSGKPGSGKPGSQAVVTQEPSLTVSPGGTVTLTCGSSTGAVTTSNYANWVQQKPGKSPRGLIGGTNKRAPGVPARFSGSLLGGKAALTISGAQPEDEADYYCALWYSNHWVFGGGTKLTVLGGGGSGGGGSKTHTCPPCPAPPVAGPSVFLFPPKPKDTLMISRTPEVTCVVVDVKHEDPEVKFNWYVDGVEVHNAKTKPREEQYNSTYRVVSVLTVLHQDWLNGKEYKCKVSNKALPAPIEKTISKAKGQPREPQVYTLPPSREQMTKNQVKLTCLVKGFYPSDIAVEWESNGQPENNYKTTPPVLDSDGSFFLYSKLTVDKSRWQQGNVFSCSVLHEALHSHYTQKSLSLSPGK

SEQ ID NO: 638 - protein, 214 aa, synthetic construct; identical to SEQ ID NO: 617

SEQ ID NO: 639 - protein, 446 aa, synthetic construct; identical to SEQ ID NO: 630

SEQ ID NO: 640 - protein, 719 aa, synthetic construct; identical to SEQ ID NO: 637

SEQ ID NO: 641 - protein, 214 aa, synthetic construct; identical to SEQ ID NO: 617

SEQ ID NO: 642 - protein, 446 aa, synthetic construct; identical to SEQ ID NO: 630

SEQ ID NO: 643 - protein, 719 aa, synthetic construct
EVQLLESGGGLEQPGGSLRLSCAASGFTFSSHAMNWVRQAPGKGLEWVSAISGSGGSTYYADSVKGRFTISRDNSKNTLCLQMNSLRAEDTAVYYCARGHNSGWPYWGQGTLVTVSSASTKGPSVFPLAPSSKSTSGGTAALGCLVKDYFPEPVTVSWNSGALTSGVHTFPAVLQSSGLYSLSSVVTVPSSSLGTQTYICNVNHKPSNTKVDKKVEPKSCGGGGSGGGGSQAVVTQEPSLTVSPGGTVTLTCGSSTGAVTTSNYANWVQQKPGKSPRGLIGGTNKRAPGVPARFSGSLLGGKAALTISGAQPEDEADYYCALWYSNHWVFGGGTKLTVLGKPGSGKPGSGKPGSGKPGSEVQLVESGGGLVQPGGSLRLSCAASGFTFSTYAMNWVRQAPGKGLEWVGRIRSKANNYATYYADSVKGRFTISRDDSKNTLYLQMNSLRAEDTAVYYCVRHGNFGDSYVSWFAYWGQGTLVTVSSGGGGSGGGGSKTHTCPPCPAPPVAGPSVFLFPPKPKDTLMISRTPEVTCVVVDVKHEDPEVKFNWYVDGVEVHNAKTKPREEQYNSTYRVVSVLTVLHQDWLNGKEYKCKVSNKALPAPIEKTISKAKGQPREPQVYTLPPSREQMTKNQVKLTCLVKGFYPSDIAVEWESNGQPENNYKTTPPVLDSDGSFFLYSKLTVDKSRWQQGNVFSCSVLHEALHSHYTQKSLSLSPGK

SEQ ID NO: 644 - protein, 214 aa, synthetic construct; identical to SEQ ID NO: 617

SEQ ID NO: 645 - protein, 449 aa, synthetic construct
EVQLLESGGGLVQPGGSLRLSCAASGFTFSSNAMSWVRQAPGKGLEWVSAIRGRGGSTYYADSVKGRFTISRDNSKNTLYLQLNSLRAEDTAVYYCAKDRIVVAGPFDHWGQGTLVTVSSASTKGPSVFPLAPSSKSTSGGTAALGCLVKDYFPEPVTVSWNSGALTSGVHTFPAVLQSSGLYSLSSVVTVPSSSLGTQTYICNVNHKPSDTKVDKKVEPKSCDKTHTCPPCPAPPVAGPSVFLFPPKPKDTLMISRTPEVTCVVVDVKHEDPEVKFNWYVDGVEVHNAKTKPREEEYNSTYRVVSVLTVLHQDWLNGKEYKCKVSNKALPAPIEKTISKAKGQPREPQVYTLPPSREEMTKNQVSLTCDVSGFYPSDIAVEWESDGQPENNYKTTPPVLDSDGSFFLYSKLTVDKSRWEQGDVFSCSVMHEALHNHYTQKSLSLSPGK

SEQ ID NO: 646 - protein, 485 aa, synthetic construct; identical to SEQ ID NO: 33

SEQ ID NO: 647 - protein, 214 aa, synthetic construct
DIQLTQSPSFLSASVGDRVTITCRASQGISSYLAWYQQKPGKAPKLLIYAASTLQSGVPSRFSGSGSGTEFTLTISSLQPEDFATYYCQQLNRYPLTFGGGTKVDIKRTVAAPSVFIFPPSDEQLKSGTASVVCLLNNFYPREAKVQWKVDNALQSGNSQESVTEQDSKDSTYSLSSTLTLSKADYEKHKVYACEVTHQGLSSPVTKSFNRGEC

SEQ ID NO: 648 - protein, 449 aa, synthetic construct; identical to SEQ ID NO: 645

SEQ ID NO: 649 - protein, 485 aa, synthetic construct; identical to SEQ ID NO: 403

SEQ ID NO: 650 - protein, 214 aa, synthetic construct; identical to SEQ ID NO: 647

SEQ ID NO: 651 - protein, 449 aa, synthetic construct; identical to SEQ ID NO: 645

SEQ ID NO: 652 - protein, 722 aa, synthetic construct
EVQLLESGGGLVQPGGSLRLSCAASGFTFSSNAMSWVRQAPGKGLEWVSAIRGRGGSTYYADSVKGRFTISRDNSKNTLYLQLNSLRAEDTAVYYCAKDRIVVAGPFDHWGQGTLVTVSSASTKGPSVFPLAPSSKSTSGGTAALGCLVKDYFPEPVTVSWNSGALTSGVHTFPAVLQSSGLYSLSSVVTVPSSSLGTQTYICNVNHKPSNTKVDKKVEPKSCGGGGSGGGGSEVQLVESGGGLVQPGGSLRLSCAASGFTFSTYAMNWVRQAPGKGLEWVGRIRSKYNNYATYYADSVKGRFTISRDDSKNTLYLQMNSLRAEDTAVYYCVRHGNFGDSYVSWFAYWGQGTLVTVSSGKPGSGKPGSGKPGSGKPGSQAVVTQEPSLTVSPGGTVTLTCGSSTGAVTTSNYANWVQQKPGKSPRGLIGGTNKRAPGVPARFSGSLLGGKAALTISGAQPEDEADYYCALWYSNHWVFGGGTKLTVLGGGGSGGGGSKTHTCPPCPAPPVAGPSVFLFPPKPKDTLMISRTPEVTCVVVDVKHEDPEVKFNWYVDGVEVHNAKTKPREEQYNSTYRVVSVLTVLHQDWLNGKEYKCKVSNKALPAPIEKTISKAKGQPREPQVYTLPPSREQMTKNQVKLTCLVKGFYPSDIAVEWESNGQPENNYKTTPPVLDSDGSFFLYSKLTVDKSRWQQGNVFSCSVMHEALHNHYTQKSLSLSPGK

SEQ ID NO: 653 - protein, 214 aa, synthetic construct; identical to SEQ ID NO: 647

SEQ ID NO: 654 - protein, 449 aa, synthetic construct; identical to SEQ ID NO: 645

SEQ ID NO: 655 - protein, 722 aa, synthetic construct; identical to SEQ ID NO: 652

SEQ ID NO: 656 - protein, 214 aa, synthetic construct; identical to SEQ ID NO: 647

SEQ ID NO: 657 - protein, 449 aa, synthetic construct; identical to SEQ ID NO: 645

SEQ ID NO: 658 - protein, 722 aa, synthetic construct
EVQLLESGGGLVQPGGSLRLSCAASGFTFSSNAMSWVRQAPGKGLEWVSAIRGRGGSTYYADSVKGRFTISRDNSKNTLYLQLNSLRAEDTAVYYCAKDRIVVAGPFDHWGQGTLVTVSSASTKGPSVFPLAPSSKSTSGGTAALGCLVKDYFPEPVTVSWNSGALTSGVHTFPAVLQSSGLYSLSSVVTVPSSSLGTQTYICNVNHKPSNTKVDKKVEPKSCGGGGSGGGGSQAVVTQEPSLTVSPGGTVTLTCGSSTGAVTTSNYANWVQQKPGKSPRGLIGGTNKRAPGVPARFSGSLLGGKAALTISGAQPEDEADYYCALWYSNHWVFGGGTKLTVLGKPGSGKPGSGKPGSGKPGSEVQLVESGGGLVQPGGSLRLSCAASGFTFSTYAMNWVRQAPGKGLEWVGRIRSKANNYATYYADSVKGRFTISRDDSKNTLYLQMNSLRAEDTAVYYCVRHGNFGDSYVSWFAYWGQGTLVTVSSGGGGSGGGGSKTHTCPPCPAPPVAGPSVFLFPPKPKDTLMISRTPEVTCVVVDVKHEDPEVKFNWYVDGVEVHNAKTKPREEQYNSTYRVVSVLTVLHQDWLNGKEYKCKVSNKALPAPIEKTISKAKGQPREPQVYTLPPSREQMTKNQVKLTCLVKGFYPSDIAVEWESNGQPENNYKTTPPVLDSDGSFFLYSKLTVDKSRWQQGNVFSCSVMHEALHNHYTQKSLSLSPGK

SEQ ID NO: 659 - protein, 214 aa, synthetic construct; identical to SEQ ID NO: 647

SEQ ID NO: 660 - protein, 449 aa, synthetic construct
EVQLLESGGGLVQPGGSLRLSCAASGFTFSSNAMSWVRQAPGKGLEWVSAIRGRGGSTYYADSVKGRFTISRDNSKNTLYLQLNSLRAEDTAVYYCAKDRIVVAGPFDHWGQGTLVTVSSASTKGPSVFPLAPSSKSTSGGTAALGCLVKDYFPEPVTVSWNSGALTSGVHTFPAVLQSSGLYSLSSVVTVPSSSLGTQTYICNVNHKPSDTKVDKKVEPKSCDKTHTCPPCPAPPVAGPSVFLFPPKPKDTLMISRTPEVTCVVVDVKHEDPEVKFNWYVDGVEVHNAKTKPREEEYNSTYRVVSVLTVLHQDWLNGKEYKCKVSNKALPAPIEKTISKAKGQPREPQVYTLPPSREEMTKNQVSLTCDVSGFYPSDIAVEWESDGQPENNYKTTPPVLDSDGSFFLYSKLTVDKSRWEQGDVFSCSVLHEALHSHYTQKSLSLSPGK

SEQ ID NO: 661 - protein, 485 aa, synthetic construct; identical to SEQ ID NO: 421

SEQ ID NO: 662 - protein, 214 aa, synthetic construct; identical to SEQ ID NO: 647

SEQ ID NO: 663 - protein, 449 aa, synthetic construct; identical to SEQ ID NO: 660

SEQ ID NO: 664 - protein, 485 aa, synthetic construct; identical to SEQ ID NO: 424

SEQ ID NO: 665 - protein, 214 aa, synthetic construct; identical to SEQ ID NO: 647

SEQ ID NO: 666 - protein, 449 aa, synthetic construct; identical to SEQ ID NO: 660

SEQ ID NO: 667 - protein, 722 aa, synthetic construct
EVQLLESGGGLVQPGGSLRLSCAASGFTFSSNAMSWVRQAPGKGLEWVSAIRGRGGSTYYADSVKGRFTISRDNSKNTLYLQLNSLRAEDTAVYYCAKDRIVVAGPFDHWGQGTLVTVSSASTKGPSVFPLAPSSKSTSGGTAALGCLVKDYFPEPVTVSWNSGALTSGVHTFPAVLQSSGLYSLSSVVTVPSSSLGTQTYICNVNHKPSNTKVDKKVEPKSCGGGGSGGGGSEVQLVESGGGLVQPGGSLRLSCAASGFTFSTYAMNWVRQAPGKGLEWVGRIRSKYNNYATYYADSVKGRFTISRDDSKNTLYLQMNSLRAEDTAVYYCVRHGNFGDSYVSWFAYWGQGTLVTVSSGKPGSGKPGSGKPGSGKPGSQAVVTQEPSLTVSPGGTVTLTCGSSTGAVTTSNYANWVQQKPGKSPRGLIGGTNKRAPGVPARFSGSLLGGKAALTISGAQPEDEADYYCALWYSNHWVFGGGTKLTVLGGGGSGGGGSKTHTCPPCPAPPVAGPSVFLFPPKPKDTLMISRTPEVTCVVVDVKHEDPEVKFNWYVDGVEVHNAKTKPREEQYNSTYRVVSVLTVLHQDWLNGKEYKCKVSNKALPAPIEKTISKAKGQPREPQVYTLPPSREQMTKNQVKLTCLVKGFYPSDIAVEWESNGQPENNYKTTPPVLDSDGSFFLYSKLTVDKSRWQQGNVFSCSVLHEALHSHYTQKSLSLSPGK

SEQ ID NO: 668 - protein, 214 aa, synthetic construct; identical to SEQ ID NO: 647

SEQ ID NO: 669 - protein, 449 aa, synthetic construct; identical to SEQ ID NO: 660

SEQ ID NO: 670 - protein, 722 aa, synthetic construct; identical to SEQ ID NO: 667

SEQ ID NO: 671 - protein, 214 aa, synthetic construct; identical to SEQ ID NO: 647

SEQ ID NO: 672 - protein, 449 aa, synthetic construct; identical to SEQ ID NO: 660

SEQ ID NO: 673 - protein, 722 aa, synthetic construct
EVQLLESGGGLVQPGGSLRLSCAASGFTFSSNAMSWVRQAPGKGLEWVSAIRGRGGSTYYADSVKGRFTISRDNSKNTLYLQLNSLRAEDTAVYYCAKDRIVVAGPFDHWGQGTLVTVSSASTKGPSVFPLAPSSKSTSGGTAALGCLVKDYFPEPVTVSWNSGALTSGVHTFPAVLQSSGLYSLSSVVTVPSSSLGTQTYICNVNHKPSNTKVDKKVEPKSCGGGGSGGGGSQAVVTQEPSLTVSPGGTVTLTCGSSTGAVTTSNYANWVQQKPGKSPRGLIGGTNKRAPGVPARFSGSLLGGKAALTISGAQPEDEADYYCALWYSNHWVFGGGTKLTVLGKPGSGKPGSGKPGSGKPGSEVQLVESGGGLVQPGGSLRLSCAASGFTFSTYAMNWVRQAPGKGLEWVGRIRSKANNYATYYADSVKGRFTISRDDSKNTLYLQMNSLRAEDTAVYYCVRHGNFGDSYVSWFAYWGQGTLVTVSSGGGGSGGGGSKTHTCPPCPAPPVAGPSVFLFPPKPKDTLMISRTPEVTCVVVDVKHEDPEVKFNWYVDGVEVHNAKTKPREEQYNSTYRVVSVLTVLHQDWLNGKEYKCKVSNKALPAPIEKTISKAKGQPREPQVYTLPPSREQMTKNQVKLTCLVKGFYPSDIAVEWESNGQPENNYKTTPPVLDSDGSFFLYSKLTVDKSRWQQGNVFSCSVLHEALHSHYTQKSLSLSPGK

SEQ ID NO: 674 - protein, 214 aa, synthetic construct; identical to SEQ ID NO: 647

SEQ ID NO: 675 - protein, 451 aa, synthetic construct
QVQLQESGPGLVKPSETLSLTCTVSGGSISRYYWSWIRQPPGKGLEWIGYIFYNKNTNYNPSLKSRVTISVDTSKNQFSLKLSSVTAADTAVYYCARYIAAIYTDLYYFDYWGQGTLVTVSSASTKGPSVFPLAPSSKSTSGGTAALGCLVKDYFPEPVTVSWNSGALTSGVHTFPAVLQSSGLYSLSSVVTVPSSSLGTQTYICNVNHKPSDTKVDKKVEPKSCDKTHTCPPCPAPPVAGPSVFLFPPKPKDTLMISRTPEVTCVVVDVKHEDPEVKFNWYVDGVEVHNAKTKPREEEYNSTYRVVSVLTVLHQDWLNGKEYKCKVSNKALPAPIEKTISKAKGQPREPQVYTLPPSREEMTKNQVSLTCDVSGFYPSDIAVEWESDGQPENNYKTTPPVLDSDGSFFLYSKLTVDKSRWEQGDVFSCSVMHEALHNHYTQKSLSLSPGK

SEQ ID NO: 676 - protein, 485 aa, synthetic construct; identical to SEQ ID NO: 33

SEQ ID NO: 677 - protein, 214 aa, synthetic construct
DIQLTQSPSFLSASVGDRVTITCRASQGISSYLAWYQQKPGKAPKLLIYAASTLQSGVPSRFSGSGSGTEFTLTISSLQPEDFATYYCQQLNSYPLTFGGGTKVEIKRTVAAPSVFIFPPSDEQLKSGTASVVCLLNNFYPREAKVQWKVDNALQSGNSQESVTEQDSKDSTYSLSSTLTLSKADYEKHKVYACEVTHQGLSSPVTKSFNRGEC

SEQ ID NO: 678 - protein, 451 aa, synthetic construct; identical to SEQ ID NO: 675

SEQ ID NO: 679 - protein, 485 aa, synthetic construct; identical to SEQ ID NO: 403

SEQ ID NO: 680 - protein, 214 aa, synthetic construct; identical to SEQ ID NO: 677

SEQ ID NO: 681 - protein, 451 aa, synthetic construct; identical to SEQ ID NO: 675

SEQ ID NO: 682 - protein, 724 aa, synthetic construct
QVQLQESGPGLVKPSETLSLTCTVSGGSISRYYWSWIRQPPGKGLEWIGYIFYNKNTNYNPSLKSRVTISVDTSKNQFSLKLSSVTAADTAVYYCARYIAAIYTDLYYFDYWGQGTLVTVSSASTKGPSVFPLAPSSKSTSGGTAALGCLVKDYFPEPVTVSWNSGALTSGVHTFPAVLQSSGLYSLSSVVTVPSSSLGTQTYICNVNHKPSNTKVDKKVEPKSCGGGGSGGGGSEVQLVESGGGLVQPGGSLRLSCAASGFTFSTYAMNWVRQAPGKGLEWVGRIRSKYNNYATYYADSVKGRFTISRDDSKNTLYLQMNSLRAEDTAVYYCVRHGNFGDSYVSWFAYWGQGTLVTVSSGKPGSGKPGSGKPGSGKPGSQAVVTQEPSLTVSPGGTVTLTCGSSTGAVTTSNYANWVQQKPGKSPRGLIGGTNKRAPGVPARFSGSLLGGKAALTISGAQPEDEADYYCALWYSNHWVFGGGTKLTVLGGGGSGGGGSKTHTCPPCPAPPVAGPSVFLFPPKPKDTLMISRTPEVTCVVVDVKHEDPEVKFNWYVDGVEVHNAKTKPREEQYNSTYRVVSVLTVLHQDWLNGKEYKCKVSNKALPAPIEKTISKAKGQPREPQVYTLPPSREQMTKNQVKLTCLVKGFYPSDIAVEWESNGQPENNYKTTPPVLDSDGSFFLYSKLTVDKSRWQQGNVFSCSVMHEALHNHYTQKSLSLSPGK

SEQ ID NO: 683 - protein, 214 aa, synthetic construct; identical to SEQ ID NO: 677

SEQ ID NO: 684 - protein, 451 aa, synthetic construct; identical to SEQ ID NO: 675

SEQ ID NO: 685 - protein, 724 aa, synthetic construct; identical to SEQ ID NO: 682

SEQ ID NO: 686 - protein, 214 aa, synthetic construct; identical to SEQ ID NO: 677

SEQ ID NO: 687 - protein, 451 aa, synthetic construct; identical to SEQ ID NO: 675

SEQ ID NO: 688 - protein, 724 aa, synthetic construct
QVQLQESGPGLVKPSETLSLTCTVSGGSISRYYWSWIRQPPGKGLEWIGYIFYNKNTNYNPSLKSRVTISVDTSKNQFSLKLSSVTAADTAVYYCARYIAAIYTDLYYFDYWGQGTLVTVSSASTKGPSVFPLAPSSKSTSGGTAALGCLVKDYFPEPVTVSWNSGALTSGVHTFPAVLQSSGLYSLSSVVTVPSSSLGTQTYICNVNHKPSNTKVDKKVEPKSCGGGGSGGGGSQAVVTQEPSLTVSPGGTVTLTCGSSTGAVTTSNYANWVQQKPGKSPRGLIGGTNKRAPGVPARFSGSLLGGKAALTISGAQPEDEADYYCALWYSNHWVFGGGTKLTVLGKPGSGKPGSGKPGSGKPGSEVQLVESGGGLVQPGGSLRLSCAASGFTFSTYAMNWVRQAPGKGLEWVGRIRSKANNYATYYADSVKGRFTISRDDSKNTLYLQMNSLRAEDTAVYYCVRHGNFGDSYVSWFAYWGQGTLVTVSSGGGGSGGGGSKTHTCPPCPAPPVAGPSVFLFPPKPKDTLMISRTPEVTCVVVDVKHEDPEVKFNWYVDGVEVHNAKTKPREEQYNSTYRVVSVLTVLHQDWLNGKEYKCKVSNKALPAPIEKTISKAKGQPREPQVYTLPPSREQMTKNQVKLTCLVKGFYPSDIAVEWESNGQPENNYKTTPPVLDSDGSFFLYSKLTVDKSRWQQGNVFSCSVMHEALHNHYTQKSLSLSPGK

SEQ ID NO: 689 - protein, 214 aa, synthetic construct; identical to SEQ ID NO: 677

SEQ ID NO: 690 - protein, 451 aa, synthetic construct
QVQLQESGPGLVKPSETLSLTCTVSGGSISRYYWSWIRQPPGKGLEWIGYIFYNKNTNYNPSLKSRVTISVDTSKNQFSLKLSSVTAADTAVYYCARYIAAIYTDLYYFDYWGQGTLVTVSSASTKGPSVFPLAPSSKSTSGGTAALGCLVKDYFPEPVTVSWNSGALTSGVHTFPAVLQSSGLYSLSSVVTVPSSSLGTQTYICNVNHKPSDTKVDKKVEPKSCDKTHTCPPCPAPPVAGPSVFLFPPKPKDTLMISRTPEVTCVVVDVKHEDPEVKFNWYVDGVEVHNAKTKPREEEYNSTYRVVSVLTVLHQDWLNGKEYKCKVSNKALPAPIEKTISKAKGQPREPQVYTLPPSREEMTKNQVSLTCDVSGFYPSDIAVEWESDGQPENNYKTTPPVLDSDGSFFLYSKLTVDKSRWEQGDVFSCSVLHEALHSHYTQKSLSLSPGK

SEQ ID NO: 691 - protein, 485 aa, synthetic construct; identical to SEQ ID NO: 421

SEQ ID NO: 692 - protein, 214 aa, synthetic construct; identical to SEQ ID NO: 677

SEQ ID NO: 693 - protein, 451 aa, synthetic construct; identical to SEQ ID NO: 690

SEQ ID NO: 694 - protein, 485 aa, synthetic construct; identical to SEQ ID NO: 424

SEQ ID NO: 695 - protein, 214 aa, synthetic construct; identical to SEQ ID NO: 677

SEQ ID NO: 696 - protein, 451 aa, synthetic construct; identical to SEQ ID NO: 690

SEQ ID NO: 697 - protein, 724 aa, synthetic construct
QVQLQESGPGLVKPSETLSLTCTVSGGSISRYYWSWIRQPPGKGLEWIGYIFYNKNTNYNPSLKSRVTISVDTSKNQFSLKLSSVTAADTAVYYCARYIAAIYTDLYYFDYWGQGTLVTVSSASTKGPSVFPLAPSSKSTSGGTAALGCLVKDYFPEPVTVSWNSGALTSGVHTFPAVLQSSGLYSLSSVVTVPSSSLGTQTYICNVNHKPSNTKVDKKVEPKSCGGGGSGGGGSEVQLVESGGGLVQPGGSLRLSCAASGFTFSTYAMNWVRQAPGKGLEWVGRIRSKYNNYATYYADSVKGRFTISRDDSKNTLYLQMNSLRAEDTAVYYCVRHGNFGDSYVSWFAYWGQGTLVTVSSGKPGSGKPGSGKPGSGKPGSQAVVTQEPSLTVSPGGTVTLTCGSSTGAVTTSNYANWVQQKPGKSPRGLIGGTNKRAPGVPARFSGSLLGGKAALTISGAQPEDEADYYCALWYSNHWVFGGGTKLTVLGGGGSGGGGSKTHTCPPCPAPPVAGPSVFLFPPKPKDTLMISRTPEVTCVVVDVKHEDPEVKFNWYVDGVEVHNAKTKPREEQYNSTYRVVSVLTVLHQDWLNGKEYKCKVSNKALPAPIEKTISKAKGQPREPQVYTLPPSREQMTKNQVKLTCLVKGFYPSDIAVEWESNGQPENNYKTTPPVLDSDGSFFLYSKLTVDKSRWQQGNVFSCSVLHEALHSHYTQKSLSLSPGK

SEQ ID NO: 698 - protein, 214 aa, synthetic construct; identical to SEQ ID NO: 677

SEQ ID NO: 699 - protein, 451 aa, synthetic construct; identical to SEQ ID NO: 690

SEQ ID NO: 700 - protein, 724 aa, synthetic construct; identical to SEQ ID NO: 697

SEQ ID NO: 701 - protein, 214 aa, synthetic construct; identical to SEQ ID NO: 677

SEQ ID NO: 702 - protein, 451 aa, synthetic construct; identical to SEQ ID NO: 690

SEQ ID NO: 703 - protein, 724 aa, synthetic construct
QVQLQESGPGLVKPSETLSLTCTVSGGSISRYYWSWIRQPPGKGLEWIGYIFYNKNTNYNPSLKSRVTISVDTSKNQFSLKLSSVTAADTAVYYCARYIAAIYTDLYYFDYWGQGTLVTVSSASTKGPSVFPLAPSSKSTSGGTAALGCLVKDYFPEPVTVSWNSGALTSGVHTFPAVLQSSGLYSLSSVVTVPSSSLGTQTYICNVNHKPSNTKVDKKVEPKSCGGGGSGGGGSQAVVTQEPSLTVSPGGTVTLTCGSSTGAVTTSNYANWVQQKPGKSPRGLIGGTNKRAPGVPARFSGSLLGGKAALTISGAQPEDEADYYCALWYSNHWVFGGGTKLTVLGKPGSGKPGSGKPGSGKPGSEVQLVESGGGLVQPGGSLRLSCAASGFTFSTYAMNWVRQAPGKGLEWVGRIRSKANNYATYYADSVKGRFTISRDDSKNTLYLQMNSLRAEDTAVYYCVRHGNFGDSYVSWFAYWGQGTLVTVSSGGGGSGGGGSKTHTCPPCPAPPVAGPSVFLFPPKPKDTLMISRTPEVTCVVVDVKHEDPEVKFNWYVDGVEVHNAKTKPREEQYNSTYRVVSVLTVLHQDWLNGKEYKCKVSNKALPAPIEKTISKAKGQPREPQVYTLPPSREQMTKNQVKLTCLVKGFYPSDIAVEWESNGQPENNYKTTPPVLDSDGSFFLYSKLTVDKSRWQQGNVFSCSVLHEALHSHYTQKSLSLSPGK

SEQ ID NO: 704 - protein, 214 aa, synthetic construct; identical to SEQ ID NO: 677

SEQ ID NO: 705 - protein, 449 aa, synthetic construct
QVQLVQSGAEVRKPGSSVKVSCKASGGTVSSYAISWVRQAPGQGLEWMGGITPIFGTAKYAQKFQGRVTITADKSTSTAYMELSSLRSEDTAVYYCARGGIAAAGTFDYWGQGTLVTVSSASTKGPSVFPLAPSSKSTSGGTAALGCLVKDYFPEPVTVSWNSGALTSGVHTFPAVLQSSGLYSLSSVVTVPSSSLGTQTYICNVNHKPSDTKVDKKVEPKSCDKTHTCPPCPAPPVAGPSVFLFPPKPKDTLMISRTPEVTCVVVDVKHEDPEVKFNWYVDGVEVHNAKTKPREEEYNSTYRVVSVLTVLHQDWLNGKEYKCKVSNKALPAPIEKTISKAKGQPREPQVYTLPPSREEMTKNQVSLTCDVSGFYPSDIAVEWESDGQPENNYKTTPPVLDSDGSFFLYSKLTVDKSRWEQGDVFSCSVMHEALHNHYTQKSLSLSPGK

SEQ ID NO: 706 - protein, 485 aa, synthetic construct; identical to SEQ ID NO: 33

SEQ ID NO: 707 - protein, 214 aa, synthetic construct
DIQMTQSPSTLSASVGDRVTITCRASQSISSWLAWYQQKPGKAPKLLIYKASSLESGVPSRFSGSGSGTEFTLTISSLQPDDFATYYCQQYNSYSWTFGQGTKVDIKRTVAAPSVFIFPPSDEQLKSGTASVVCLLNNFYPREAKVQWKVDNALQSGNSQESVTEQDSKDSTYSLSSTLTLSKADYEKHKVYACEVTHQGLSSPVTKSFNRGEC

SEQ ID NO: 708 - protein, 449 aa, synthetic construct; identical to SEQ ID NO: 705

SEQ ID NO: 709 - protein, 485 aa, synthetic construct; identical to SEQ ID NO: 403

SEQ ID NO: 710 - protein, 214 aa, synthetic construct; identical to SEQ ID NO: 707

SEQ ID NO: 711 - protein, 449 aa, synthetic construct; identical to SEQ ID NO: 705

SEQ ID NO: 712 - protein, 722 aa, synthetic construct
QVQLVQSGAEVRKPGSSVKVSCKASGGTVSSYAISWVRQAPGQGLEWMGGITPIFGTAKYAQKFQGRVTITADKSTSTAYMELSSLRSEDTAVYYCARGGIAAAGTFDYWGQGTLVTVSSASTKGPSVFPLAPSSKSTSGGTAALGCLVKDYFPEPVTVSWNSGALTSGVHTFPAVLQSSGLYSLSSVVTVPSSSLGTQTYICNVNHKPSNTKVDKKVEPKSCGGGGSGGGGSEVQLVESGGGLVQPGGSLRLSCAASGFTFSTYAMNWVRQAPGKGLEWVGRIRSKYNNYATYYADSVKGRFTISRDDSKNTLYLQMNSLRAEDTAVYYCVRHGNFGDSYVSWFAYWGQGTLVTVSSGKPGSGKPGSGKPGSGKPGSQAVVTQEPSLTVSPGGTVTLTCGSSTGAVTTSNYANWVQQKPGKSPRGLIGGTNKRAPGVPARFSGSLLGGKAALTISGAQPEDEADYYCALWYSNHWVFGGGTKLTVLGGGGSGGGGSKTHTCPPCPAPPVAGPSVFLFPPKPKDTLMISRTPEVTCVVVDVKHEDPEVKFNWYVDGVEVHNAKTKPREEQYNSTYRVVSVLTVLHQDWLNGKEYKCKVSNKALPAPIEKTISKAKGQPREPQVYTLPPSREQMTKNQVKLTCLVKGFYPSDIAVEWESNGQPENNYKTTPPVLDSDGSFFLYSKLTVDKSRWQQGNVFSCSVMHEALHNHYTQKSLSLSPGK

SEQ ID NO: 713 - protein, 214 aa, synthetic construct; identical to SEQ ID NO: 707

SEQ ID NO: 714 - protein, 449 aa, synthetic construct; identical to SEQ ID NO: 705

SEQ ID NO: 715 - protein, 722 aa, synthetic construct; identical to SEQ ID NO: 712

SEQ ID NO: 716 - protein, 214 aa, synthetic construct; identical to SEQ ID NO: 707

SEQ ID NO: 717 - protein, 449 aa, synthetic construct; identical to SEQ ID NO: 705

SEQ ID NO: 718 - protein, 722 aa, synthetic construct
QVQLVQSGAEVRKPGSSVKVSCKASGGTVSSYAISWVRQAPGQGLEWMGGITPIFGTAKYAQKFQGRVTITADKSTSTAYMELSSLRSEDTAVYYCARGGIAAAGTFDYWGQGTLVTVSSASTKGPSVFPLAPSSKSTSGGTAALGCLVKDYFPEPVTVSWNSGALTSGVHTFPAVLQSSGLYSLSSVVTVPSSSLGTQTYICNVNHKPSNTKVDKKVEPKSCGGGGSGGGGSQAVVTQEPSLTVSPGGTVTLTCGSSTGAVTTSNYANWVQQKPGKSPRGLIGGTNKRAPGVPARFSGSLLGGKAALTISGAQPEDEADYYCALWYSNHWVFGGGTKLTVLGKPGSGKPGSGKPGSGKPGSEVQLVESGGGLVQPGGSLRLSCAASGFTFSTYAMNWVRQAPGKGLEWVGRIRSKANNYATYYADSVKGRFTISRDDSKNTLYLQMNSLRAEDTAVYYCVRHGNFGDSYVSWFAYWGQGTLVTVSSGGGGSGGGGSKTHTCPPCPAPPVAGPSVFLFPPKPKDTLMISRTPEVTCVVVDVKHEDPEVKFNWYVDGVEVHNAKTKPREEQYNSTYRVVSVLTVLHQDWLNGKEYKCKVSNKALPAPIEKTISKAKGQPREPQVYTLPPSREQMTKNQVKLTCLVKGFYPSDIAVEWESNGQPENNYKTTPPVLDSDGSFFLYSKLTVDKSRWQQGNVFSCSVMHEALHNHYTQKSLSLSPGK

SEQ ID NO: 719 - protein, 214 aa, synthetic construct; identical to SEQ ID NO: 707

SEQ ID NO: 720 - protein, 449 aa, synthetic construct
QVQLVQSGAEVRKPGSSVKVSCKASGGTVSSYAISWVRQAPGQGLEWMGGITPIFGTAKYAQKFQGRVTITADKSTSTAYMELSSLRSEDTAVYYCARGGIAAAGTFDYWGQGTLVTVSSASTKGPSVFPLAPSSKSTSGGTAALGCLVKDYFPEPVTVSWNSGALTSGVHTFPAVLQSSGLYSLSSVVTVPSSSLGTQTYICNVNHKPSDTKVDKKVEPKSCDKTHTCPPCPAPPVAGPSVFLFPPKPKDTLMISRTPEVTCVVVDVKHEDPEVKFNWYVDGVEVHNAKTKPREEEYNSTYRVVSVLTVLHQDWLNGKEYKCKVSNKALPAPIEKTISKAKGQPREPQVYTLPPSREEMTKNQVSLTCDVSGFYPSDIAVEWESDGQPENNYKTTPPVLDSDGSFFLYSKLTVDKSRWEQGDVFSCSVLHEALHSHYTQKSLSLSPGK

SEQ ID NO: 721 - protein, 485 aa, synthetic construct; identical to SEQ ID NO: 421

SEQ ID NO: 722 - protein, 214 aa, synthetic construct; identical to SEQ ID NO: 707

SEQ ID NO: 723 - protein, 449 aa, synthetic construct; identical to SEQ ID NO: 720

SEQ ID NO: 724 - protein, 485 aa, synthetic construct; identical to SEQ ID NO: 424

SEQ ID NO: 725 - protein, 214 aa, synthetic construct; identical to SEQ ID NO: 707

SEQ ID NO: 726 - protein, 449 aa, synthetic construct; identical to SEQ ID NO: 720

SEQ ID NO: 727 - protein, 722 aa, synthetic construct
QVQLVQSGAEVRKPGSSVKVSCKASGGTVSSYAISWVRQAPGQGLEWMGGITPIFGTAKYAQKFQGRVTITADKSTSTAYMELSSLRSEDTAVYYCARGGIAAAGTFDYWGQGTLVTVSSASTKGPSVFPLAPSSKSTSGGTAALGCLVKDYFPEPVTVSWNSGALTSGVHTFPAVLQSSGLYSLSSVVTVPSSSLGTQTYICNVNHKPSNTKVDKKVEPKSCGGGGSGGGGSEVQLVESGGGLVQPGGSLRLSCAASGFTFSTYAMNWVRQAPGKGLEWVGRIRSKYNNYATYYADSVKGRFTISRDDSKNTLYLQMNSLRAEDTAVYYCVRHGNFGDSYVSWFAYWGQGTLVTVSSGKPGSGKPGSGKPGSGKPGSQAVVTQEPSLTVSPGGTVTLTCGSSTGAVTTSNYANWVQQKPGKSPRGLIGGTNKRAPGVPARFSGSLLGGKAALTISGAQPEDEADYYCALWYSNHWVFGGGTKLTVLGGGGSGGGGSKTHTCPPCPAPPVAGPSVFLFPPKPKDTLMISRTPEVTCVVVDVKHEDPEVKFNWYVDGVEVHNAKTKPREEQYNSTYRVVSVLTVLHQDWLNGKEYKCKVSNKALPAPIEKTISKAKGQPREPQVYTLPPSREQMTKNQVKLTCLVKGFYPSDIAVEWESNGQPENNYKTTPPVLDSDGSFFLYSKLTVDKSRWQQGNVFSCSVLHEALHSHYTQKSLSLSPGK

SEQ ID NO: 728 - protein, 214 aa, synthetic construct; identical to SEQ ID NO: 707

SEQ ID NO: 729 - protein, 449 aa, synthetic construct; identical to SEQ ID NO: 720

SEQ ID NO: 730 - protein, 722 aa, synthetic construct; identical to SEQ ID NO: 727

SEQ ID NO: 731 - protein, 214 aa, synthetic construct; identical to SEQ ID NO: 707

SEQ ID NO: 732 - protein, 449 aa, synthetic construct; identical to SEQ ID NO: 720

SEQ ID NO: 733 - protein, 722 aa, synthetic construct
QVQLVQSGAEVRKPGSSVKVSCKASGGTVSSYAISWVRQAPGQGLEWMGGITPIFGTAKYAQKFQGRVTITADKSTSTAYMELSSLRSEDTAVYYCARGGIAAAGTFDYWGQGTLVTVSSASTKGPSVFPLAPSSKSTSGGTAALGCLVKDYFPEPVTVSWNSGALTSGVHTFPAVLQSSGLYSLSSVVTVPSSSLGTQTYICNVNHKPSNTKVDKKVEPKSCGGGGSGGGGSQAVVTQEPSLTVSPGGTVTLTCGSSTGAVTTSNYANWVQQKPGKSPRGLIGGTNKRAPGVPARFSGSLLGGKAALTISGAQPEDEADYYCALWYSNHWVFGGGTKLTVLGKPGSGKPGSGKPGSGKPGSEVQLVESGGGLVQPGGSLRLSCAASGFTFSTYAMNWVRQAPGKGLEWVGRIRSKANNYATYYADSVKGRFTISRDDSKNTLYLQMNSLRAEDTAVYYCVRHGNFGDSYVSWFAYWGQGTLVTVSSGGGGSGGGGSKTHTCPPCPAPPVAGPSVFLFPPKPKDTLMISRTPEVTCVVVDVKHEDPEVKFNWYVDGVEVHNAKTKPREEQYNSTYRVVSVLTVLHQDWLNGKEYKCKVSNKALPAPIEKTISKAKGQPREPQVYTLPPSREQMTKNQVKLTCLVKGFYPSDIAVEWESNGQPENNYKTTPPVLDSDGSFFLYSKLTVDKSRWQQGNVFSCSVLHEALHSHYTQKSLSLSPGK

SEQ ID NO: 734 - protein, 214 aa, synthetic construct; identical to SEQ ID NO: 707

SEQ ID NO: 735 - protein, 454 aa, synthetic construct
QVQLVESGGGVVQPGRSLRLSCAASGFTFSSYGMHWVRQTPGKGLEWVAVMWYDGRNKYYADSVKGRFTISRDNSKNTLYLQMNSLRAEDTAVYYCARDRIMVRGVIIPHVFDIWGQGTMVTVSSASTKGPSVFPLAPSSKSTSGGTAALGCLVKDYFPEPVTVSWNSGALTSGVHTFPAVLQSSGLYSLSSVVTVPSSSLGTQTYICNVNHKPSDTKVDKKVEPKSCDKTHTCPPCPAPPVAGPSVFLFPPKPKDTLMISRTPEVTCVVVDVKHEDPEVKFNWYVDGVEVHNAKTKPREEEYNSTYRVVSVLTVLHQDWLNGKEYKCKVSNKALPAPIEKTISKAKGQPREPQVYTLPPSREEMTKNQVSLTCDVSGFYPSDIAVEWESDGQPENNYKTTPPVLDSDGSFFLYSKLTVDKSRWEQGDVFSCSVMHEALHNHYTQKSLSLSPGK

SEQ ID NO: 736 - protein, 485 aa, synthetic construct; identical to SEQ ID NO: 33

SEQ ID NO: 737 - protein, 213 aa, synthetic construct
EIVMTQSPATLSVSPGERATLSCRASQSVSSNLGWYQQKPGQAPRLLIYGASTRATGIPARFSGSGSGTEFILTISSLQSEDFAVYYCQEYNNWWTFGQGTKVDIKRTVAAPSVFIFPPSDEQLKSGTASVVCLLNNFYPREAKVQWKVDNALQSGNSQESVTEQDSKDSTYSLSSTLTLSKADYEKHKVYACEVTHQGLSSPVTKSFNRGEC

SEQ ID NO: 738 - protein, 454 aa, synthetic construct; identical to SEQ ID NO: 735

SEQ ID NO: 739 - protein, 485 aa, synthetic construct; identical to SEQ ID NO: 403

SEQ ID NO: 740 - protein, 213 aa, synthetic construct; identical to SEQ ID NO: 737

SEQ ID NO: 741 - protein, 454 aa, synthetic construct; identical to SEQ ID NO: 735

SEQ ID NO: 742 - protein, 727 aa, synthetic construct
QVQLVESGGGVVQPGRSLRLSCAASGFTFSSYGMHWVRQTPGKGLEWVAVMWYDGRNKYYADSVKGRFTISRDNSKNTLYLQMNSLRAEDTAVYYCARDRIMVRGVIIPHVFDIWGQGTMVTVSSASTKGPSVFPLAPSSKSTSGGTAALGCLVKDYFPEPVTVSWNSGALTSGVHTFPAVLQSSGLYSLSSVVTVPSSSLGTQTYICNVNHKPSNTKVDKKVEPKSCGGGGSGGGGSEVQLVESGGGLVQPGGSLRLSCAASGFTFSTYAMNWVRQAPGKGLEWVGRIRSKYNNYATYYADSVKGRFTISRDDSKNTLYLQMNSLRAEDTAVYYCVRHGNFGDSYVSWFAYWGQGTLVTVSSGKPGSGKPGSGKPGSGKPGSQAVVTQEPSLTVSPGGTVTLTCGSSTGAVTTSNYANWVQQKPGKSPRGLIGGTNKRAPGVPARFSGSLLGGKAALTISGAQPEDEADYYCALWYSNHWVFGGGTKLTVLGGGGSGGGGSKTHTCPPCPAPPVAGPSVFLFPPKPKDTLMISRTPEVTCVVVDVKHEDPEVKFNWYVDGVEVHNAKTKPREEQYNSTYRVVSVLTVLHQDWLNGKEYKCKVSNKALPAPIEKTISKAKGQPREPQVYTLPPSREQMTKNQVKLTCLVKGFYPSDIAVEWESNGQPENNYKTTPPVLDSDGSFFLYSKLTVDKSRWQQGNVFSCSVMHEALHNHYTQKSLSLSPGK

SEQ ID NO: 743 - protein, 213 aa, synthetic construct; identical to SEQ ID NO: 737

SEQ ID NO: 744 - protein, 454 aa, synthetic construct; identical to SEQ ID NO: 735

SEQ ID NO: 745 - protein, 727 aa, synthetic construct; identical to SEQ ID NO: 742

SEQ ID NO: 746 - protein, 213 aa, synthetic construct; identical to SEQ ID NO: 737

SEQ ID NO: 747 - protein, 454 aa, synthetic construct; identical to SEQ ID NO: 735

SEQ ID NO: 748 - protein, 727 aa, synthetic construct
QVQLVESGGGVVQPGRSLRLSCAASGFTFSSYGMHWVRQTPGKGLEWVAVMWYDGRNKYYADSVKGRFTISRDNSKNTLYLQMNSLRAEDTAVYYCARDRIMVRGVIIPHVFDIWGQGTMVTVSSASTKGPSVFPLAPSSKSTSGGTAALGCLVKDYFPEPVTVSWNSGALTSGVHTFPAVLQSSGLYSLSSVVTVPSSSLGTQTYICNVNHKPSNTKVDKKVEPKSCGGGGSGGGGSQAVVTQEPSLTVSPGGTVTLTCGSSTGAVTTSNYANWVQQKPGKSPRGLIGGTNKRAPGVPARFSGSLLGGKAALTISGAQPEDEADYYCALWYSNHWVFGGGTKLTVLGKPGSGKPGSGKPGSGKPGSEVQLVESGGGLVQPGGSLRLSCAASGFTFSTYAMNWVRQAPGKGLEWVGRIRSKANNYATYYADSVKGRFTISRDDSKNTLYLQMNSLRAEDTAVYYCVRHGNFGDSYVSWFAYWGQGTLVTVSSGGGGSGGGGSKTHTCPPCPAPPVAGPSVFLFPPKPKDTLMISRTPEVTCVVVDVKHEDPEVKFNWYVDGVEVHNAKTKPREEQYNSTYRVVSVLTVLHQDWLNGKEYKCKVSNKALPAPIEKTISKAKGQPREPQVYTLPPSREQMTKNQVKLTCLVKGFYPSDIAVEWESNGQPENNYKTTPPVLDSDGSFFLYSKLTVDKSRWQQGNVFSCSVMHEALHNHYTQKSLSLSPGK

SEQ ID NO: 749 - protein, 213 aa, synthetic construct; identical to SEQ ID NO: 737

SEQ ID NO: 750 - protein, 454 aa, synthetic construct
QVQLVESGGGVVQPGRSLRLSCAASGFTFSSYGMHWVRQTPGKGLEWVAVMWYDGRNKYYADSVKGRFTISRDNSKNTLYLQMNSLRAEDTAVYYCARDRIMVRGVIIPHVFDIWGQGTMVTVSSASTKGPSVFPLAPSSKSTSGGTAALGCLVKDYFPEPVTVSWNSGALTSGVHTFPAVLQSSGLYSLSSVVTVPSSSLGTQTYICNVNHKPSDTKVDKKVEPKSCDKTHTCPPCPAPPVAGPSVFLFPPKPKDTLMISRTPEVTCVVVDVKHEDPEVKFNWYVDGVEVHNAKTKPREEEYNSTYRVVSVLTVLHQDWLNGKEYKCKVSNKALPAPIEKTISKAKGQPREPQVYTLPPSREEMTKNQVSLTCDVSGFYPSDIAVEWESDGQPENNYKTTPPVLDSDGSFFLYSKLTVDKSRWEQGDVFSCSVLHEALHSHYTQKSLSLSPGK

SEQ ID NO: 751 - protein, 485 aa, synthetic construct; identical to SEQ ID NO: 421

SEQ ID NO: 752 - protein, 213 aa, synthetic construct; identical to SEQ ID NO: 737

SEQ ID NO: 753 - protein, 454 aa, synthetic construct; identical to SEQ ID NO: 750

SEQ ID NO: 754 - protein, 485 aa, synthetic construct; identical to SEQ ID NO: 424

SEQ ID NO: 755 - protein, 213 aa, synthetic construct; identical to SEQ ID NO: 737

SEQ ID NO: 756 - protein, 454 aa, synthetic construct; identical to SEQ ID NO: 750

SEQ ID NO: 757 - protein, 727 aa, synthetic construct
QVQLVESGGGVVQPGRSLRLSCAASGFTFSSYGMHWVRQTPGKGLEWVAVMWYDGRNKYYADSVKGRFTISRDNSKNTLYLQMNSLRAEDTAVYYCARDRIMVRGVIIPHVFDIWGQGTMVTVSSASTKGPSVFPLAPSSKSTSGGTAALGCLVKDYFPEPVTVSWNSGALTSGVHTFPAVLQSSGLYSLSSVVTVPSSSLGTQTYICNVNHKPSNTKVDKKVEPKSCGGGGSGGGGSEVQLVESGGGLVQPGGSLRLSCAASGFTFSTYAMNWVRQAPGKGLEWVGRIRSKYNNYATYYADSVKGRFTISRDDSKNTLYLQMNSLRAEDTAVYYCVRHGNFGDSYVSWFAYWGQGTLVTVSSGKPGSGKPGSGKPGSGKPGSQAVVTQEPSLTVSPGGTVTLTCGSSTGAVTTSNYANWVQQKPGKSPRGLIGGTNKRAPGVPARFSGSLLGGKAALTISGAQPEDEADYYCALWYSNHWVFGGGTKLTVLGGGGSGGGGSKTHTCPPCPAPPVAGPSVFLFPPKPKDTLMISRTPEVTCVVVDVKHEDPEVKFNWYVDGVEVHNAKTKPREEQYNSTYRVVSVLTVLHQDWLNGKEYKCKVSNKALPAPIEKTISKAKGQPREPQVYTLPPSREQMTKNQVKLTCLVKGFYPSDIAVEWESNGQPENNYKTTPPVLDSDGSFFLYSKLTVDKSRWQQGNVFSCSVLHEALHSHYTQKSLSLSPGK

SEQ ID NO: 758 - protein, 213 aa, synthetic construct; identical to SEQ ID NO: 737

SEQ ID NO: 759 - protein, 454 aa, synthetic construct; identical to SEQ ID NO: 750

SEQ ID NO: 760 - protein, 727 aa, synthetic construct; identical to SEQ ID NO: 757

SEQ ID NO: 761 - protein, 213 aa, synthetic construct; identical to SEQ ID NO: 737

SEQ ID NO: 762 - protein, 454 aa, synthetic construct; identical to SEQ ID NO: 750

SEQ ID NO: 763 - protein, 727 aa, synthetic construct
QVQLVESGGGVVQPGRSLRLSCAASGFTFSSYGMHWVRQTPGKGLEWVAVMWYDGRNKYYADSVKGRFTISRDNSKNTLYLQMNSLRAEDTAVYYCARDRIMVRGVIIPHVFDIWGQGTMVTVSSASTKGPSVFPLAPSSKSTSGGTAALGCLVKDYFPEPVTVSWNSGALTSGVHTFPAVLQSSGLYSLSSVVTVPSSSLGTQTYICNVNHKPSNTKVDKKVEPKSCGGGGSGGGGSQAVVTQEPSLTVSPGGTVTLTCGSSTGAVTTSNYANWVQQKPGKSPRGLIGGTNKRAPGVPARFSGSLLGGKAALTISGAQPEDEADYYCALWYSNHWVFGGGTKLTVLGKPGSGKPGSGKPGSGKPGSEVQLVESGGGLVQPGGSLRLSCAASGFTFSTYAMNWVRQAPGKGLEWVGRIRSKANNYATYYADSVKGRFTISRDDSKNTLYLQMNSLRAEDTAVYYCVRHGNFGDSYVSWFAYWGQGTLVTVSSGGGGSGGGGSKTHTCPPCPAPPVAGPSVFLFPPKPKDTLMISRTPEVTCVVVDVKHEDPEVKFNWYVDGVEVHNAKTKPREEQYNSTYRVVSVLTVLHQDWLNGKEYKCKVSNKALPAPIEKTISKAKGQPREPQVYTLPPSREQMTKNQVKLTCLVKGFYPSDIAVEWESNGQPENNYKTTPPVLDSDGSFFLYSKLTVDKSRWQQGNVFSCSVLHEALHSHYTQKSLSLSPGK

SEQ ID NO: 764 - protein, 213 aa, synthetic construct; identical to SEQ ID NO: 737

SEQ ID NO: 765 - protein, 451 aa, synthetic construct
QVQLVESGGGVVQPGRSLRLSCAASGFTFSSYVMHWVRQAPGKGLEWVAVIWYAGNKKYYADSVKGRFTISRDNSNNTLYLQMNSLRAEDTAVYYCAREYSSSWHYYGMDVWGQGTTVTVSSASTKGPSVFPLAPSSKSTSGGTAALGCLVKDYFPEPVTVSWNSGALTSGVHTFPAVLQSSGLYSLSSVVTVPSSSLGTQTYICNVNHKPSDTKVDKKVEPKSCDKTHTCPPCPAPPVAGPSVFLFPPKPKDTLMISRTPEVTCVVVDVKHEDPEVKFNWYVDGVEVHNAKTKPREEEYNSTYRVVSVLTVLHQDWLNGKEYKCKVSNKALPAPIEKTISKAKGQPREPQVYTLPPSREEMTKNQVSLTCDVSGFYPSDIAVEWESDGQPENNYKTTPPVLDSDGSFFLYSKLTVDKSRWEQGDVFSCSVMHEALHNHYTQKSLSLSPGK

SEQ ID NO: 766 - protein, 485 aa, synthetic construct; identical to SEQ ID NO: 33

SEQ ID NO: 767 - protein, 214 aa, synthetic construct
DIQLTQSPSFLSASVGDRVTITCRASQGISSYLAWYQQKPGKAPKLLIYAASTLQSGVPSRFSGSGSGTEFTLTISSLQPEDFATYYCQQLNSYPLTFGGGTKVDIKRTVAAPSVFIFPPSDEQLKSGTASVVCLLNNFYPREAKVQWKVDNALQSGNSQESVTEQDSKDSTYSLSSTLTLSKADYEKHKVYACEVTHQGLSSPVTKSFNRGEC

SEQ ID NO: 768 - protein, 451 aa, synthetic construct; identical to SEQ ID NO: 765

SEQ ID NO: 769 - protein, 485 aa, synthetic construct; identical to SEQ ID NO: 403

SEQ ID NO: 770 - protein, 214 aa, synthetic construct; identical to SEQ ID NO: 767

SEQ ID NO: 771 - protein, 451 aa, synthetic construct; identical to SEQ ID NO: 765

SEQ ID NO: 772 - protein, 724 aa, synthetic construct
QVQLVESGGGVVQPGRSLRLSCAASGFTFSSYVMHWVRQAPGKGLEWVAVIWYAGNKKYYADSVKGRFTISRDNSNNTLYLQMNSLRAEDTAVYYCAREYSSSWHYYGMDVWGQGTTVTVSSASTKGPSVFPLAPSSKSTSGGTAALGCLVKDYFPEPVTVSWNSGALTSGVHTFPAVLQSSGLYSLSSVVTVPSSSLGTQTYICNVNHKPSNTKVDKKVEPKSCGGGGSGGGGSEVQLVESGGGLVQPGGSLRLSCAASGFTFSTYAMNWVRQAPGKGLEWVGRIRSKYNNYATYYADSVKGRFTISRDDSKNTLYLQMNSLRAEDTAVYYCVRHGNFGDSYVSWFAYWGQGTLVTVSSGKPGSGKPGSGKPGSGKPGSQAVVTQEPSLTVSPGGTVTLTCGSSTGAVTTSNYANWVQQKPGKSPRGLIGGTNKRAPGVPARFSGSLLGGKAALTISGAQPEDEADYYCALWYSNHWVFGGGTKLTVLGGGGSGGGGSKTHTCPPCPAPPVAGPSVFLFPPKPKDTLMISRTPEVTCVVVDVKHEDPEVKFNWYVDGVEVHNAKTKPREEQYNSTYRVVSVLTVLHQDWLNGKEYKCKVSNKALPAPIEKTISKAKGQPREPQVYTLPPSREQMTKNQVKLTCLVKGFYPSDIAVEWESNGQPENNYKTTPPVLDSDGSFFLYSKLTVDKSRWQQGNVFSCSVMHEALHNHYTQKSLSLSPGK

SEQ ID NO: 773 - protein, 214 aa, synthetic construct; identical to SEQ ID NO: 767

SEQ ID NO: 774 - protein, 451 aa, synthetic construct; identical to SEQ ID NO: 765

SEQ ID NO: 775 - protein, 724 aa, synthetic construct; identical to SEQ ID NO: 772

SEQ ID NO: 776 - protein, 214 aa, synthetic construct; identical to SEQ ID NO: 767

SEQ ID NO: 777 - protein, 451 aa, synthetic construct; identical to SEQ ID NO: 765

SEQ ID NO: 778 - protein, 724 aa, synthetic construct
QVQLVESGGGVVQPGRSLRLSCAASGFTFSSYVMHWVRQAPGKGLEWVAVIWYAGNKKYYADSVKGRFTISRDNSNNTLYLQMNSLRAEDTAVYYCAREYSSSWHYYGMDVWGQGTTVTVSSASTKGPSVFPLAPSSKSTSGGTAALGCLVKDYFPEPVTVSWNSGALTSGVHTFPAVLQSSGLYSLSSVVTVPSSSLGTQTYICNVNHKPSNTKVDKKVEPKSCGGGGSGGGGSQAVVTQEPSLTVSPGGTVTLTCGSSTGAVTTSNYANWVQQKPGKSPRGLIGGTNKRAPGVPARFSGSLLGGKAALTISGAQPEDEADYYCALWYSNHWVFGGGTKLTVLGKPGSGKPGSGKPGSGKPGSEVQLVESGGGLVQPGGSLRLSCAASGFTFSTYAMNWVRQAPGKGLEWVGRIRSKANNYATYYADSVKGRFTISRDDSKNTLYLQMNSLRAEDTAVYYCVRHGNFGDSYVSWFAYWGQGTLVTVSSGGGGSGGGGSKTHTCPPCPAPPVAGPSVFLFPPKPKDTLMISRTPEVTCVVVDVKHEDPEVKFNWYVDGVEVHNAKTKPREEQYNSTYRVVSVLTVLHQDWLNGKEYKCKVSNKALPAPIEKTISKAKGQPREPQVYTLPPSREQMTKNQVKLTCLVKGFYPSDIAVEWESNGQPENNYKTTPPVLDSDGSFFLYSKLTVDKSRWQQGNVFSCSVMHEALHNHYTQKSLSLSPGK

SEQ ID NO: 779 - protein, 214 aa, synthetic construct; identical to SEQ ID NO: 767

SEQ ID NO: 780 - protein, 451 aa, synthetic construct
QVQLVESGGGVVQPGRSLRLSCAASGFTFSSYVMHWVRQAPGKGLEWVAVIWYAGNKKYYADSVKGRFTISRDNSNNTLYLQMNSLRAEDTAVYYCAREYSSSWHYYGMDVWGQGTTVTVSSASTKGPSVFPLAPSSKSTSGGTAALGCLVKDYFPEPVTVSWNSGALTSGVHTFPAVLQSSGLYSLSSVVTVPSSSLGTQTYICNVNHKPSDTKVDKKVEPKSCDKTHTCPPCPAPPVAGPSVFLFPPKPKDTLMISRTPEVTCVVVDVKHEDPEVKFNWYVDGVEVHNAKTKPREEEYNSTYRVVSVLTVLHQDWLNGKEYKCKVSNKALPAPIEKTISKAKGQPREPQVYTLPPSREEMTKNQVSLTCDVSGFYPSDIAVEWESDGQPENNYKTTPPVLDSDGSFFLYSKLTVDKSRWEQGDVFSCSVLHEALHSHYTQKSLSLSPGK

SEQ ID NO: 781 - protein, 485 aa, synthetic construct; identical to SEQ ID NO: 421

SEQ ID NO: 782 - protein, 214 aa, synthetic construct; identical to SEQ ID NO: 767

SEQ ID NO: 783 - protein, 451 aa, synthetic construct; identical to SEQ ID NO: 780

SEQ ID NO: 784 - protein, 485 aa, synthetic construct; identical to SEQ ID NO: 424

SEQ ID NO: 785 - protein, 214 aa, synthetic construct; identical to SEQ ID NO: 767

SEQ ID NO: 786 - protein, 451 aa, synthetic construct; identical to SEQ ID NO: 780

SEQ ID NO: 787 - protein, 724 aa, synthetic construct
QVQLVESGGGVVQPGRSLRLSCAASGFTFSSYVMHWVRQAPGKGLEWVAVIWYAGNKKYYADSVKGRFTISRDNSNNTLYLQMNSLRAEDTAVYYCAREYSSSWHYYGMDVWGQGTTVTVSSASTKGPSVFPLAPSSKSTSGGTAALGCLVKDYFPEPVTVSWNSGALTSGVHTFPAVLQSSGLYSLSSVVTVPSSSLGTQTYICNVNHKPSNTKVDKKVEPKSCGGGGSGGGGSEVQLVESGGGLVQPGGSLRLSCAASGFTFSTYAMNWVRQAPGKGLEWVGRIRSKYNNYATYYADSVKGRFTISRDDSKNTLYLQMNSLRAEDTAVYYCVRHGNFGDSYVSWFAYWGQGTLVTVSSGKPGSGKPGSGKPGSGKPGSQAVVTQEPSLTVSPGGTVTLTCGSSTGAVTTSNYANWVQQKPGKSPRGLIGGTNKRAPGVPARFSGSLLGGKAALTISGAQPEDEADYYCALWYSNHWVFGGGTKLTVLGGGGSGGGGSKTHTCPPCPAPPVAGPSVFLFPPKPKDTLMISRTPEVTCVVVDVKHEDPEVKFNWYVDGVEVHNAKTKPREEQYNSTYRVVSVLTVLHQDWLNGKEYKCKVSNKALPAPIEKTISKAKGQPREPQVYTLPPSREQMTKNQVKLTCLVKGFYPSDIAVEWESNGQPENNYKTTPPVLDSDGSFFLYSKLTVDKSRWQQGNVFSCSVLHEALHSHYTQKSLSLSPGK

SEQ ID NO: 788 - protein, 214 aa, synthetic construct; identical to SEQ ID NO: 767

SEQ ID NO: 789 - protein, 451 aa, synthetic construct; identical to SEQ ID NO: 780

SEQ ID NO: 790 - protein, 724 aa, synthetic construct; identical to SEQ ID NO: 787

SEQ ID NO: 791 - protein, 214 aa, synthetic construct; identical to SEQ ID NO: 767

SEQ ID NO: 792 - protein, 451 aa, synthetic construct; identical to SEQ ID NO: 780

SEQ ID NO: 793 - protein, 724 aa, synthetic construct
QVQLVESGGGVVQPGRSLRLSCAASGFTFSSYVMHWVRQAPGKGLEWVAVIWYAGNKKYYADSVKGRFTISRDNSNNTLYLQMNSLRAEDTAVYYCAREYSSSWHYYGMDVWGQGTTVTVSSASTKGPSVFPLAPSSKSTSGGTAALGCLVKDYFPEPVTVSWNSGALTSGVHTFPAVLQSSGLYSLSSVVTVPSSSLGTQTYICNVNHKPSNTKVDKKVEPKSCGGGGSGGGGSQAVVTQEPSLTVSPGGTVTLTCGSSTGAVTTSNYANWVQQKPGKSPRGLIGGTNKRAPGVPARFSGSLLGGKAALTISGAQPEDEADYYCALWYSNHWVFGGGTKLTVLGKPGSGKPGSGKPGSGKPGSEVQLVESGGGLVQPGGSLRLSCAASGFTFSTYAMNWVRQAPGKGLEWVGRIRSKANNYATYYADSVKGRFTISRDDSKNTLYLQMNSLRAEDTAVYYCVRHGNFGDSYVSWFAYWGQGTLVTVSSGGGGSGGGGSKTHTCPPCPAPPVAGPSVFLFPPKPKDTLMISRTPEVTCVVVDVKHEDPEVKFNWYVDGVEVHNAKTKPREEQYNSTYRVVSVLTVLHQDWLNGKEYKCKVSNKALPAPIEKTISKAKGQPREPQVYTLPPSREQMTKNQVKLTCLVKGFYPSDIAVEWESNGQPENNYKTTPPVLDSDGSFFLYSKLTVDKSRWQQGNVFSCSVLHEALHSHYTQKSLSLSPGK

SEQ ID NO: 794 - protein, 214 aa, synthetic construct; identical to SEQ ID NO: 767

SEQ ID NO: 795 - protein, 447 aa, synthetic construct
QVQLQESGPGLVKPSGTLSLTCAVSGGSINSNNWWSWVRQPPGKGLEWIGDIYHSGSTNYNPSLKSRVTISVDKSKSQFSLKLSSVTAADTAVYYCARRRWLQHFDFWGQGTLVTVSSASTKGPSVFPLAPSSKSTSGGTAALGCLVKDYFPEPVTVSWNSGALTSGVHTFPAVLQSSGLYSLSSVVTVPSSSLGTQTYICNVNHKPSDTKVDKKVEPKSCDKTHTCPPCPAPPVAGPSVFLFPPKPKDTLMISRTPEVTCVVVDVKHEDPEVKFNWYVDGVEVHNAKTKPREEEYNSTYRVVSVLTVLHQDWLNGKEYKCKVSNKALPAPIEKTISKAKGQPREPQVYTLPPSREEMTKNQVSLTCDVSGFYPSDIAVEWESDGQPENNYKTTPPVLDSDGSFFLYSKLTVDKSRWEQGDVFSCSVMHEALHNHYTQKSLSLSPGK

SEQ ID NO: 796 - protein, 485 aa, synthetic construct; identical to SEQ ID NO: 33

SEQ ID NO: 797 - protein, 214 aa, synthetic construct
DIQMTQSPSTLSASVGDRVTITCRASQSITNWLAWYQQKPGKAPKLLIYKASSLESGVPSRFSGSGSGTEFTLAISSLQPDDFATYYCQQYNIYPLAFGGGTKVEIKRTVAAPSVFIFPPSDEQLKSGTASVVCLLNNFYPREAKVQWKVDNALQSGNSQESVTEQDSKDSTYSLSSTLTLSKADYEKHKVYACEVTHQGLSSPVTKSFNRGEC

SEQ ID NO: 798 - protein, 447 aa, synthetic construct; identical to SEQ ID NO: 795

SEQ ID NO: 799 - protein, 485 aa, synthetic construct; identical to SEQ ID NO: 403

SEQ ID NO: 800 - protein, 214 aa, synthetic construct; identical to SEQ ID NO: 797

SEQ ID NO: 801 - protein, 447 aa, synthetic construct; identical to SEQ ID NO: 795

SEQ ID NO: 802 - protein, 720 aa, synthetic construct
QVQLQESGPGLVKPSGTLSLTCAVSGGSINSNNWWSWVRQPPGKGLEWIGDIYHSGSTNYNPSLKSRVTISVDKSKSQFSLKLSSVTAADTAVYYCARRRWLQHFDFWGQGTLVTVSSASTKGPSVFPLAPSSKSTSGGTAALGCLVKDYFPEPVTVSWNSGALTSGVHTFPAVLQSSGLYSLSSVVTVPSSSLGTQTYICNVNHKPSNTKVDKKVEPKSCGGGGSGGGGSEVQLVESGGGLVQPGGSLRLSCAASGFTFSTYAMNWVRQAPGKGLEWVGRIRSKYNNYATYYADSVKGRFTISRDDSKNTLYLQMNSLRAEDTAVYYCVRHGNFGDSYVSWFAYWGQGTLVTVSSGKPGSGKPGSGKPGSGKPGSQAVVTQEPSLTVSPGGTVTLTCGSSTGAVTTSNYANWVQQKPGKSPRGLIGGTNKRAPGVPARFSGSLLGGKAALTISGAQPEDEADYYCALWYSNHWVFGGGTKLTVLGGGGSGGGGSKTHTCPPCPAPPVAGPSVFLFPPKPKDTLMISRTPEVTCVVVDVKHEDPEVKFNWYVDGVEVHNAKTKPREEQYNSTYRVVSVLTVLHQDWLNGKEYKCKVSNKALPAPIEKTISKAKGQPREPQVYTLPPSREQMTKNQVKLTCLVKGFYPSDIAVEWESNGQPENNYKTTPPVLDSDGSFFLYSKLTVDKSRWQQGNVFSCSVMHEALHNHYTQKSLSLSPGK

SEQ ID NO: 803 - protein, 214 aa, synthetic construct; identical to SEQ ID NO: 797

SEQ ID NO: 804 - protein, 447 aa, synthetic construct; identical to SEQ ID NO: 795

SEQ ID NO: 805 - protein, 720 aa, synthetic construct; identical to SEQ ID NO: 802

SEQ ID NO: 806 - protein, 214 aa, synthetic construct; identical to SEQ ID NO: 797

SEQ ID NO: 807 - protein, 447 aa, synthetic construct; identical to SEQ ID NO: 795

SEQ ID NO: 808 - protein, 720 aa, synthetic construct
QVQLQESGPGLVKPSGTLSLTCAVSGGSINSNNWWSWVRQPPGKGLEWIGDIYHSGSTNYNPSLKSRVTISVDKSKSQFSLKLSSVTAADTAVYYCARRRWLQHFDFWGQGTLVTVSSASTKGPSVFPLAPSSKSTSGGTAALGCLVKDYFPEPVTVSWNSGALTSGVHTFPAVLQSSGLYSLSSVVTVPSSSLGTQTYICNVNHKPSNTKVDKKVEPKSCGGGGSGGGGSQAVVTQEPSLTVSPGGTVTLTCGSSTGAVTTSNYANWVQQKPGKSPRGLIGGTNKRAPGVPARFSGSLLGGKAALTISGAQPEDEADYYCALWYSNHWVFGGGTKLTVLGKPGSGKPGSGKPGSGKPGSEVQLVESGGGLVQPGGSLRLSCAASGFTFSTYAMNWVRQAPGKGLEWVGRIRSKANNYATYYADSVKGRFTISRDDSKNTLYLQMNSLRAEDTAVYYCVRHGNFGDSYVSWFAYWGQGTLVTVSSGGGGSGGGGSKTHTCPPCPAPPVAGPSVFLFPPKPKDTLMISRTPEVTCVVVDVKHEDPEVKFNWYVDGVEVHNAKTKPREEQYNSTYRVVSVLTVLHQDWLNGKEYKCKVSNKALPAPIEKTISKAKGQPREPQVYTLPPSREQMTKNQVKLTCLVKGFYPSDIAVEWESNGQPENNYKTTPPVLDSDGSFFLYSKLTVDKSRWQQGNVFSCSVMHEALHNHYTQKSLSLSPGK

SEQ ID NO: 809 - protein, 214 aa, synthetic construct; identical to SEQ ID NO: 797

SEQ ID NO: 810 - protein, 447 aa, synthetic construct
QVQLQESGPGLVKPSGTLSLTCAVSGGSINSNNWWSWVRQPPGKGLEWIGDIYHSGSTNYNPSLKSRVTISVDKSKSQFSLKLSSVTAADTAVYYCARRRWLQHFDFWGQGTLVTVSSASTKGPSVFPLAPSSKSTSGGTAALGCLVKDYFPEPVTVSWNSGALTSGVHTFPAVLQSSGLYSLSSVVTVPSSSLGTQTYICNVNHKPSDTKVDKKVEPKSCDKTHTCPPCPAPPVAGPSVFLFPPKPKDTLMISRTPEVTCVVVDVKHEDPEVKFNWYVDGVEVHNAKTKPREEEYNSTYRVVSVLTVLHQDWLNGKEYKCKVSNKALPAPIEKTISKAKGQPREPQVYTLPPSREEMTKNQVSLTCDVSGFYPSDIAVEWESDGQPENNYKTTPPVLDSDGSFFLYSKLTVDKSRWEQGDVFSCSVLHEALHSHYTQKSLSLSPGK

SEQ ID NO: 811 - protein, 485 aa, synthetic construct; identical to SEQ ID NO: 421

SEQ ID NO: 812 - protein, 214 aa, synthetic construct; identical to SEQ ID NO: 797

SEQ ID NO: 813 - protein, 447 aa, synthetic construct; identical to SEQ ID NO: 810

SEQ ID NO: 814 - protein, 485 aa, synthetic construct; identical to SEQ ID NO: 424

SEQ ID NO: 815 - protein, 214 aa, synthetic construct; identical to SEQ ID NO: 797

SEQ ID NO: 816 - protein, 447 aa, synthetic construct; identical to SEQ ID NO: 810

SEQ ID NO: 817 - protein, 720 aa, synthetic construct
QVQLQESGPGLVKPSGTLSLTCAVSGGSINSNNWWSWVRQPPGKGLEWIGDIYHSGSTNYNPSLKSRVTISVDKSKSQFSLKLSSVTAADTAVYYCARRRWLQHFDFWGQGTLVTVSSASTKGPSVFPLAPSSKSTSGGTAALGCLVKDYFPEPVTVSWNSGALTSGVHTFPAVLQSSGLYSLSSVVTVPSSSLGTQTYICNVNHKPSNTKVDKKVEPKSCGGGGSGGGGSEVQLVESGGGLVQPGGSLRLSCAASGFTFSTYAMNWVRQAPGKGLEWVGRIRSKYNNYATYYADSVKGRFTISRDDSKNTLYLQMNSLRAEDTAVYYCVRHGNFGDSYVSWFAYWGQGTLVTVSSGKPGSGKPGSGKPGSGKPGSQAVVTQEPSLTVSPGGTVTLTCGSSTGAVTTSNYANWVQQKPGKSPRGLIGGTNKRAPGVPARFSGSLLGGKAALTISGAQPEDEADYYCALWYSNHWVFGGGTKLTVLGGGGSGGGGSKTHTCPPCPAPPVAGPSVFLFPPKPKDTLMISRTPEVTCVVVDVKHEDPEVKFNWYVDGVEVHNAKTKPREEQYNSTYRVVSVLTVLHQDWLNGKEYKCKVSNKALPAPIEKTISKAKGQPREPQVYTLPPSREQMTKNQVKLTCLVKGFYPSDIAVEWESNGQPENNYKTTPPVLDSDGSFFLYSKLTVDKSRWQQGNVFSCSVLHEALHSHYTQKSLSLSPGK

SEQ ID NO: 818 - protein, 214 aa, synthetic construct; identical to SEQ ID NO: 797

SEQ ID NO: 819 - protein, 447 aa, synthetic construct; identical to SEQ ID NO: 810

SEQ ID NO: 820 - protein, 720 aa, synthetic construct; identical to SEQ ID NO: 817

SEQ ID NO: 821 - protein, 214 aa, synthetic construct; identical to SEQ ID NO: 797

SEQ ID NO: 822 - protein, 447 aa, synthetic construct; identical to SEQ ID NO: 810

SEQ ID NO: 823 - protein, 720 aa, synthetic construct
QVQLQESGPGLVKPSGTLSLTCAVSGGSINSNNWWSWVRQPPGKGLEWIGDIYHSGSTNYNPSLKSRVTISVDKSKSQFSLKLSSVTAADTAVYYCARRRWLQHFDFWGQGTLVTVSSASTKGPSVFPLAPSSKSTSGGTAALGCLVKDYFPEPVTVSWNSGALTSGVHTFPAVLQSSGLYSLSSVVTVPSSSLGTQTYICNVNHKPSNTKVDKKVEPKSCGGGGSGGGGSQAVVTQEPSLTVSPGGTVTLTCGSSTGAVTTSNYANWVQQKPGKSPRGLIGGTNKRAPGVPARFSGSLLGGKAALTISGAQPEDEADYYCALWYSNHWVFGGGTKLTVLGKPGSGKPGSGKPGSGKPGSEVQLVESGGGLVQPGGSLRLSCAASGFTFSTYAMNWVRQAPGKGLEWVGRIRSKANNYATYYADSVKGRFTISRDDSKNTLYLQMNSLRAEDTAVYYCVRHGNFGDSYVSWFAYWGQGTLVTVSSGGGGSGGGGSKTHTCPPCPAPPVAGPSVFLFPPKPKDTLMISRTPEVTCVVVDVKHEDPEVKFNWYVDGVEVHNAKTKPREEQYNSTYRVVSVLTVLHQDWLNGKEYKCKVSNKALPAPIEKTISKAKGQPREPQVYTLPPSREQMTKNQVKLTCLVKGFYPSDIAVEWESNGQPENNYKTTPPVLDSDGSFFLYSKLTVDKSRWQQGNVFSCSVLHEALHSHYTQKSLSLSPGK

SEQ ID NO: 824 - protein, 214 aa, synthetic construct; identical to SEQ ID NO: 797

SEQ ID NO: 825 - protein, 450 aa, synthetic construct
QVQLVQSGAEVKKPGASVKVSCKASGYTFTGYYMHWVRQAPGQGLEWMGRFNLHSGVTNYAQKFQGRVTMTRDTSISTVYMDLSRLRSDDTAVYYCARERQWLVQDYFDYWGQGTLVTVSSASTKGPSVFPLAPSSKSTSGGTAALGCLVKDYFPEPVTVSWNSGALTSGVHTFPAVLQSSGLYSLSSVVTVPSSSLGTQTYICNVNHKPSDTKVDKKVEPKSCDKTHTCPPCPAPPVAGPSVFLFPPKPKDTLMISRTPEVTCVVVDVKHEDPEVKFNWYVDGVEVHNAKTKPREEEYNSTYRVVSVLTVLHQDWLNGKEYKCKVSNKALPAPIEKTISKAKGQPREPQVYTLPPSREEMTKNQVSLTCDVSGFYPSDIAVEWESDGQPENNYKTTPPVLDSDGSFFLYSKLTVDKSRWEQGDVFSCSVMHEALHNHYTQKSLSLSPGK

SEQ ID NO: 826 - protein, 485 aa, synthetic construct; identical to SEQ ID NO: 33

SEQ ID NO: 827 - protein, 214 aa, synthetic construct
DIQMTQSPSSLSASVGDRVTITCRASQSISNYLNWYQQKPGKAPNLLICAASSLQSGVPSRFSGSGSGTDFTLTISSLQPEDFATYYCQQSYSIPPTFGQGTKVDIKRTVAAPSVFIFPPSDEQLKSGTASVVCLLNNFYPREAKVQWKVDNALQSGNSQESVTEQDSKDSTYSLSSTLTLSKADYEKHKVYACEVTHQGLSSPVTKSFNRGEC

SEQ ID NO: 828 - protein, 450 aa, synthetic construct; identical to SEQ ID NO: 825

SEQ ID NO: 829 - protein, 485 aa, synthetic construct; identical to SEQ ID NO: 403

SEQ ID NO: 830 - protein, 214 aa, synthetic construct; identical to SEQ ID NO: 827

SEQ ID NO: 831 - protein, 450 aa, synthetic construct; identical to SEQ ID NO: 825

SEQ ID NO: 832 - protein, 723 aa, synthetic construct
QVQLVQSGAEVKKPGASVKVSCKASGYTFTGYYMHWVRQAPGQGLEWMGRFNLHSGVTNYAQKFQGRVTMTRDTSISTVYMDLSRLRSDDTAVYYCARERQWLVQDYFDYWGQGTLVTVSSASTKGPSVFPLAPSSKSTSGGTAALGCLVKDYFPEPVTVSWNSGALTSGVHTFPAVLQSSGLYSLSSVVTVPSSSLGTQTYICNVNHKPSNTKVDKKVEPKSCGGGGSGGGGSEVQLVESGGGLVQPGGSLRLSCAASGFTFSTYAMNWVRQAPGKGLEWVGRIRSKYNNYATYYADSVKGRFTISRDDSKNTLYLQMNSLRAEDTAVYYCVRHGNFGDSYVSWFAYWGQGTLVTVSSGKPGSGKPGSGKPGSGKPGSQAVVTQEPSLTVSPGGTVTLTCGSSTGAVTTSNYANWVQQKPGKSPRGLIGGTNKRAPGVPARFSGSLLGGKAALTISGAQPEDEADYYCALWYSNHWVFGGGTKLTVLGGGGSGGGGSKTHTCPPCPAPPVAGPSVFLFPPKPKDTLMISRTPEVTCVVVDVKHEDPEVKFNWYVDGVEVHNAKTKPREEQYNSTYRVVSVLTVLHQDWLNGKEYKCKVSNKALPAPIEKTISKAKGQPREPQVYTLPPSREQMTKNQVKLTCLVKGFYPSDIAVEWESNGQPENNYKTTPPVLDSDGSFFLYSKLTVDKSRWQQGNVFSCSVMHEALHNHYTQKSLSLSPGK

SEQ ID NO: 833 - protein, 214 aa, synthetic construct; identical to SEQ ID NO: 827

SEQ ID NO: 834 - protein, 450 aa, synthetic construct; identical to SEQ ID NO: 825

SEQ ID NO: 835 - protein, 723 aa, synthetic construct; identical to SEQ ID NO: 832

SEQ ID NO: 836 - protein, 214 aa, synthetic construct; identical to SEQ ID NO: 827

SEQ ID NO: 837 - protein, 450 aa, synthetic construct; identical to SEQ ID NO: 825

SEQ ID NO: 838 - protein, 723 aa, synthetic construct
QVQLVQSGAEVKKPGASVKVSCKASGYTFTGYYMHWVRQAPGQGLEWMGRFNLHSGVTNYAQKFQGRVTMTRDTSISTVYMDLSRLRSDDTAVYYCARERQWLVQDYFDYWGQGTLVTVSSASTKGPSVFPLAPSSKSTSGGTAALGCLVKDYFPEPVTVSWNSGALTSGVHTFPAVLQSSGLYSLSSVVTVPSSSLGTQTYICNVNHKPSNTKVDKKVEPKSCGGGGSGGGGSQAVVTQEPSLTVSPGGTVTLTCGSSTGAVTTSNYANWVQQKPGKSPRGLIGGTNKRAPGVPARFSGSLLGGKAALTISGAQPEDEADYYCALWYSNHWVFGGGTKLTVLGKPGSGKPGSGKPGSGKPGSEVQLVESGGGLVQPGGSLRLSCAASGFTFSTYAMNWVRQAPGKGLEWVGRIRSKANNYATYYADSVKGRFTISRDDSKNTLYLQMNSLRAEDTAVYYCVRHGNFGDSYVSWFAYWGQGTLVTVSSGGGGSGGGGSKTHTCPPCPAPPVAGPSVFLFPPKPKDTLMISRTPEVTCVVVDVKHEDPEVKFNWYVDGVEVHNAKTKPREEQYNSTYRVVSVLTVLHQDWLNGKEYKCKVSNKALPAPIEKTISKAKGQPREPQVYTLPPSREQMTKNQVKLTCLVKGFYPSDIAVEWESNGQPENNYKTTPPVLDSDGSFFLYSKLTVDKSRWQQGNVFSCSVMHEALHNHYTQKSLSLSPGK

SEQ ID NO: 839 - protein, 214 aa, synthetic construct; identical to SEQ ID NO: 827

SEQ ID NO: 840 - protein, 450 aa, synthetic construct
QVQLVQSGAEVKKPGASVKVSCKASGYTFTGYYMHWVRQAPGQGLEWMGRFNLHSGVTNYAQKFQGRVTMTRDTSISTVYMDLSRLRSDDTAVYYCARERQWLVQDYFDYWGQGTLVTVSSASTKGPSVFPLAPSSKSTSGGTAALGCLVKDYFPEPVTVSWNSGALTSGVHTFPAVLQSSGLYSLSSVVTVPSSSLGTQTYICNVNHKPSDTKVDKKVEPKSCDKTHTCPPCPAPPVAGPSVFLFPPKPKDTLMISRTPEVTCVVVDVKHEDPEVKFNWYVDGVEVHNAKTKPREEEYNSTYRVVSVLTVLHQDWLNGKEYKCKVSNKALPAPIEKTISKAKGQPREPQVYTLPPSREEMTKNQVSLTCDVSGFYPSDIAVEWESDGQPENNYKTTPPVLDSDGSFFLYSKLTVDKSRWEQGDVFSCSVLHEALHSHYTQKSLSLSPGK

SEQ ID NO: 841 - protein, 485 aa, synthetic construct; identical to SEQ ID NO: 421

SEQ ID NO: 842 - protein, 214 aa, synthetic construct; identical to SEQ ID NO: 827

SEQ ID NO: 843 - protein, 450 aa, synthetic construct; identical to SEQ ID NO: 840

SEQ ID NO: 844 - protein, 485 aa, synthetic construct; identical to SEQ ID NO: 424

SEQ ID NO: 845 - protein, 214 aa, synthetic construct; identical to SEQ ID NO: 827

SEQ ID NO: 846 - protein, 450 aa, synthetic construct; identical to SEQ ID NO: 840

SEQ ID NO: 847 - protein, 723 aa, synthetic construct
QVQLVQSGAEVKKPGASVKVSCKASGYTFTGYYMHWVRQAPGQGLEWMGRFNLHSGVTNYAQKFQGRVTMTRDTSISTVYMDLSRLRSDDTAVYYCARERQWLVQDYFDYWGQGTLVTVSSASTKGPSVFPLAPSSKSTSGGTAALGCLVKDYFPEPVTVSWNSGALTSGVHTFPAVLQSSGLYSLSSVVTVPSSSLGTQTYICNVNHKPSNTKVDKKVEPKSCGGGGSGGGGSEVQLVESGGGLVQPGGSLRLSCAASGFTFSTYAMNWVRQAPGKGLEWVGRIRSKYNNYATYYADSVKGRFTISRDDSKNTLYLQMNSLRAEDTAVYYCVRHGNFGDSYVSWFAYWGQGTLVTVSSGKPGSGKPGSGKPGSGKPGSQAVVTQEPSLTVSPGGTVTLTCGSSTGAVTTSNYANWVQQKPGKSPRGLIGGTNKRAPGVPARFSGSLLGGKAALTISGAQPEDEADYYCALWYSNHWVFGGGTKLTVLGGGGSGGGGSKTHTCPPCPAPPVAGPSVFLFPPKPKDTLMISRTPEVTCVVVDVKHEDPEVKFNWYVDGVEVHNAKTKPREEQYNSTYRVVSVLTVLHQDWLNGKEYKCKVSNKALPAPIEKTISKAKGQPREPQVYTLPPSREQMTKNQVKLTCLVKGFYPSDIAVEWESNGQPENNYKTTPPVLDSDGSFFLYSKLTVDKSRWQQGNVFSCSVLHEALHSHYTQKSLSLSPGK

SEQ ID NO: 848 - protein, 214 aa, synthetic construct; identical to SEQ ID NO: 827

SEQ ID NO: 849 - protein, 450 aa, synthetic construct; identical to SEQ ID NO: 840

SEQ ID NO: 850 - protein, 723 aa, synthetic construct; identical to SEQ ID NO: 847

SEQ ID NO: 851 - protein, 214 aa, synthetic construct; identical to SEQ ID NO: 827

SEQ ID NO: 852 - protein, 450 aa, synthetic construct; identical to SEQ ID NO: 840

SEQ ID NO: 853 - protein, 723 aa, synthetic construct
QVQLVQSGAEVKKPGASVKVSCKASGYTFTGYYMHWVRQAPGQGLEWMGRFNLHSGVTNYAQKFQGRVTMTRDTSISTVYMDLSRLRSDDTAVYYCARERQWLVQDYFDYWGQGTLVTVSSASTKGPSVFPLAPSSKSTSGGTAALGCLVKDYFPEPVTVSWNSGALTSGVHTFPAVLQSSGLYSLSSVVTVPSSSLGTQTYICNVNHKPSNTKVDKKVEPKSCGGGGSGGGGSQAVVTQEPSLTVSPGGTVTLTCGSSTGAVTTSNYANWVQQKPGKSPRGLIGGTNKRAPGVPARFSGSLLGGKAALTISGAQPEDEADYYCALWYSNHWVFGGGTKLTVLGKPGSGKPGSGKPGSGKPGSEVQLVESGGGLVQPGGSLRLSCAASGFTFSTYAMNWVRQAPGKGLEWVGRIRSKANNYATYYADSVKGRFTISRDDSKNTLYLQMNSLRAEDTAVYYCVRHGNFGDSYVSWFAYWGQGTLVTVSSGGGGSGGGGSKTHTCPPCPAPPVAGPSVFLFPPKPKDTLMISRTPEVTCVVVDVKHEDPEVKFNWYVDGVEVHNAKTKPREEQYNSTYRVVSVLTVLHQDWLNGKEYKCKVSNKALPAPIEKTISKAKGQPREPQVYTLPPSREQMTKNQVKLTCLVKGFYPSDIAVEWESNGQPENNYKTTPPVLDSDGSFFLYSKLTVDKSRWQQGNVFSCSVLHEALHSHYTQKSLSLSPGK

SEQ ID NO: 854 - protein, 214 aa, synthetic construct; identical to SEQ ID NO: 827

SEQ ID NO: 855 - protein, 449 aa, synthetic construct
QVQLVESGGGVVQPGRSLRLSCAASGFTFSNYGMHWVRQAPGKGLEWVSFIWYDGSHRYYADSVKGRFTISRDNSKNTLYLQMNSLRAEDTAVYYCAKGRGGLDWYFDLWGRGTLVTVSSASTKGPSVFPLAPSSKSTSGGTAALGCLVKDYFPEPVTVSWNSGALTSGVHTFPAVLQSSGLYSLSSVVTVPSSSLGTQTYICNVNHKPSDTKVDKKVEPKSCDKTHTCPPCPAPPVAGPSVFLFPPKPKDTLMISRTPEVTCVVVDVKHEDPEVKFNWYVDGVEVHNAKTKPREEEYNSTYRVVSVLTVLHQDWLNGKEYKCKVSNKALPAPIEKTISKAKGQPREPQVYTLPPSREEMTKNQVSLTCDVSGFYPSDIAVEWESDGQPENNYKTTPPVLDSDGSFFLYSKLTVDKSRWEQGDVFSCSVMHEALHNHYTQKSLSLSPGK

SEQ ID NO: 856 - protein, 485 aa, synthetic construct; identical to SEQ ID NO: 33

SEQ ID NO: 857 - protein, 214 aa, synthetic construct
DIQMTQSPSTLSASVGDRVTITCRASQSISSWLAWYQQKPGKAPKLLIYKASSLESGVPSRFSGSGSGTEFTLTISSLQPDDFATYYCLQYNSYSYTFGQGTKLEIKRTVAAPSVFIFPPSDEQLKSGTASVVCLLNNFYPREAKVQWKVDNALQSGNSQESVTEQDSKDSTYSLSSTLTLSKADYEKHKVYACEVTHQGLSSPVTKSFNRGEC

SEQ ID NO: 858 - protein, 449 aa, synthetic construct; identical to SEQ ID NO: 855

SEQ ID NO: 859 - protein, 485 aa, synthetic construct; identical to SEQ ID NO: 403

SEQ ID NO: 860 - protein, 214 aa, synthetic construct; identical to SEQ ID NO: 857

SEQ ID NO: 861 - protein, 449 aa, synthetic construct; identical to SEQ ID NO: 855

SEQ ID NO: 862 - protein, 722 aa, synthetic construct
QVQLVESGGGVVQPGRSLRLSCAASGFTFSNYGMHWVRQAPGKGLEWVSFIWYDGSHRYYADSVKGRFTISRDNSKNTLYLQMNSLRAEDTAVYYCAKGRGGLDWYFDLWGRGTLVTVSSASTKGPSVFPLAPSSKSTSGGTAALGCLVKDYFPEPVTVSWNSGALTSGVHTFPAVLQSSGLYSLSSVVTVPSSSLGTQTYICNVNHKPSNTKVDKKVEPKSCGGGGSGGGGSEVQLVESGGGLVQPGGSLRLSCAASGFTFSTYAMNWVRQAPGKGLEWVGRIRSKYNNYATYYADSVKGRFTISRDDSKNTLYLQMNSLRAEDTAVYYCVRHGNFGDSYVSWFAYWGQGTLVTVSSGKPGSGKPGSGKPGSGKPGSQAVVTQEPSLTVSPGGTVTLTCGSSTGAVTTSNYANWVQQKPGKSPRGLIGGTNKRAPGVPARFSGSLLGGKAALTISGAQPEDEADYYCALWYSNHWVFGGGTKLTVLGGGGSGGGGSKTHTCPPCPAPPVAGPSVFLFPPKPKDTLMISRTPEVTCVVVDVKHEDPEVKFNWYVDGVEVHNAKTKPREEQYNSTYRVVSVLTVLHQDWLNGKEYKCKVSNKALPAPIEKTISKAKGQPREPQVYTLPPSREQMTKNQVKLTCLVKGFYPSDIAVEWESNGQPENNYKTTPPVLDSDGSFFLYSKLTVDKSRWQQGNVFSCSVMHEALHNHYTQKSLSLSPGK

SEQ ID NO: 863 - protein, 214 aa, synthetic construct; identical to SEQ ID NO: 857

SEQ ID NO: 864 - protein, 449 aa, synthetic construct; identical to SEQ ID NO: 855

SEQ ID NO: 865 - protein, 722 aa, synthetic construct; identical to SEQ ID NO: 862

SEQ ID NO: 866 - protein, 214 aa, synthetic construct; identical to SEQ ID NO: 857

SEQ ID NO: 867 - protein, 449 aa, synthetic construct; identical to SEQ ID NO: 855

SEQ ID NO: 868 - protein, 722 aa, synthetic construct
QVQLVESGGGVVQPGRSLRLSCAASGFTFSNYGMHWVRQAPGKGLEWVSFIWYDGSHRYYADSVKGRFTISRDNSKNTLYLQMNSLRAEDTAVYYCAKGRGGLDWYFDLWGRGTLVTVSSASTKGPSVFPLAPSSKSTSGGTAALGCLVKDYFPEPVTVSWNSGALTSGVHTFPAVLQSSGLYSLSSVVTVPSSSLGTQTYICNVNHKPSNTKVDKKVEPKSCGGGGSGGGGSQAVVTQEPSLTVSPGGTVTLTCGSSTGAVTTSNYANWVQQKPGKSPRGLIGGTNKRAPGVPARFSGSLLGGKAALTISGAQPEDEADYYCALWYSNHWVFGGGTKLTVLGKPGSGKPGSGKPGSGKPGSEVQLVESGGGLVQPGGSLRLSCAASGFTFSTYAMNWVRQAPGKGLEWVGRIRSKANNYATYYADSVKGRFTISRDDSKNTLYLQMNSLRAEDTAVYYCVRHGNFGDSYVSWFAYWGQGTLVTVSSGGGGSGGGGSKTHTCPPCPAPPVAGPSVFLFPPKPKDTLMISRTPEVTCVVVDVKHEDPEVKFNWYVDGVEVHNAKTKPREEQYNSTYRVVSVLTVLHQDWLNGKEYKCKVSNKALPAPIEKTISKAKGQPREPQVYTLPPSREQMTKNQVKLTCLVKGFYPSDIAVEWESNGQPENNYKTTPPVLDSDGSFFLYSKLTVDKSRWQQGNVFSCSVMHEALHNHYTQKSLSLSPGK

SEQ ID NO: 869 - protein, 214 aa, synthetic construct; identical to SEQ ID NO: 857

SEQ ID NO: 870 - protein, 449 aa, synthetic construct
QVQLVESGGGVVQPGRSLRLSCAASGFTFSNYGMHWVRQAPGKGLEWVSFIWYDGSHRYYADSVKGRFTISRDNSKNTLYLQMNSLRAEDTAVYYCAKGRGGLDWYFDLWGRGTLVTVSSASTKGPSVFPLAPSSKSTSGGTAALGCLVKDYFPEPVTVSWNSGALTSGVHTFPAVLQSSGLYSLSSVVTVPSSSLGTQTYICNVNHKPSDTKVDKKVEPKSCDKTHTCPPCPAPPVAGPSVFLFPPKPKDTLMISRTPEVTCVVVDVKHEDPEVKFNWYVDGVEVHNAKTKPREEEYNSTYRVVSVLTVLHQDWLNGKEYKCKVSNKALPAPIEKTISKAKGQPREPQVYTLPPSREEMTKNQVSLTCDVSGFYPSDIAVEWESDGQPENNYKTTPPVLDSDGSFFLYSKLTVDKSRWEQGDVFSCSVLHEALHSHYTQKSLSLSPGK

SEQ ID NO: 871 - protein, 485 aa, synthetic construct; identical to SEQ ID NO: 421

SEQ ID NO: 872 - protein, 214 aa, synthetic construct; identical to SEQ ID NO: 857

SEQ ID NO: 873 - protein, 449 aa, synthetic construct; identical to SEQ ID NO: 870

SEQ ID NO: 874 - protein, 485 aa, synthetic construct; identical to SEQ ID NO: 424

SEQ ID NO: 875 - protein, 214 aa, synthetic construct; identical to SEQ ID NO: 857

SEQ ID NO: 876 - protein, 449 aa, synthetic construct; identical to SEQ ID NO: 870

SEQ ID NO: 877 - protein, 722 aa, synthetic construct
QVQLVESGGGVVQPGRSLRLSCAASGFTFSNYGMHWVRQAPGKGLEWVSFIWYDGSHRYYADSVKGRFTISRDNSKNTLYLQMNSLRAEDTAVYYCAKGRGGLDWYFDLWGRGTLVTVSSASTKGPSVFPLAPSSKSTSGGTAALGCLVKDYFPEPVTVSWNSGALTSGVHTFPAVLQSSGLYSLSSVVTVPSSSLGTQTYICNVNHKPSNTKVDKKVEPKSCGGGGSGGGGSEVQLVESGGGLVQPGGSLRLSCAASGFTFSTYAMNWVRQAPGKGLEWVGRIRSKYNNYATYYADSVKGRFTISRDDSKNTLYLQMNSLRAEDTAVYYCVRHGNFGDSYVSWFAYWGQGTLVTVSSGKPGSGKPGSGKPGSGKPGSQAVVTQEPSLTVSPGGTVTLTCGSSTGAVTTSNYANWVQQKPGKSPRGLIGGTNKRAPGVPARFSGSLLGGKAALTISGAQPEDEADYYCALWYSNHWVFGGGTKLTVLGGGGSGGGGSKTHTCPPCPAPPVAGPSVFLFPPKPKDTLMISRTPEVTCVVVDVKHEDPEVKFNWYVDGVEVHNAKTKPREEQYNSTYRVVSVLTVLHQDWLNGKEYKCKVSNKALPAPIEKTISKAKGQPREPQVYTLPPSREQMTKNQVKLTCLVKGFYPSDIAVEWESNGQPENNYKTTPPVLDSDGSFFLYSKLTVDKSRWQQGNVFSCSVLHEALHSHYTQKSLSLSPGK

SEQ ID NO: 878 - protein, 214 aa, synthetic construct; identical to SEQ ID NO: 857

SEQ ID NO: 879 - protein, 449 aa, synthetic construct; identical to SEQ ID NO: 870

SEQ ID NO: 880 - protein, 722 aa, synthetic construct; identical to SEQ ID NO: 877

SEQ ID NO: 881 - protein, 214 aa, synthetic construct; identical to SEQ ID NO: 857

SEQ ID NO: 882 - protein, 449 aa, synthetic construct; identical to SEQ ID NO: 870

SEQ ID NO: 883 - protein, 722 aa, synthetic construct
QVQLVESGGGVVQPGRSLRLSCAASGFTFSNYGMHWVRQAPGKGLEWVSFIWYDGSHRYYADSVKGRFTISRDNSKNTLYLQMNSLRAEDTAVYYCAKGRGGLDWYFDLWGRGTLVTVSSASTKGPSVFPLAPSSKSTSGGTAALGCLVKDYFPEPVTVSWNSGALTSGVHTFPAVLQSSGLYSLSSVVTVPSSSLGTQTYICNVNHKPSNTKVDKKVEPKSCGGGGSGGGGSQAVVTQEPSLTVSPGGTVTLTCGSSTGAVTTSNYANWVQQKPGKSPRGLIGGTNKRAPGVPARFSGSLLGGKAALTISGAQPEDEADYYCALWYSNHWVFGGGTKLTVLGKPGSGKPGSGKPGSGKPGSEVQLVESGGGLVQPGGSLRLSCAASGFTFSTYAMNWVRQAPGKGLEWVGRIRSKANNYATYYADSVKGRFTISRDDSKNTLYLQMNSLRAEDTAVYYCVRHGNFGDSYVSWFAYWGQGTLVTVSSGGGGSGGGGSKTHTCPPCPAPPVAGPSVFLFPPKPKDTLMISRTPEVTCVVVDVKHEDPEVKFNWYVDGVEVHNAKTKPREEQYNSTYRVVSVLTVLHQDWLNGKEYKCKVSNKALPAPIEKTISKAKGQPREPQVYTLPPSREQMTKNQVKLTCLVKGFYPSDIAVEWESNGQPENNYKTTPPVLDSDGSFFLYSKLTVDKSRWQQGNVFSCSVLHEALHSHYTQKSLSLSPGK

SEQ ID NO: 884 - protein, 214 aa, synthetic construct; identical to SEQ ID NO: 857

SEQ ID NO: 885 - protein, 447 aa, synthetic construct; identical to SEQ ID NO: 465

SEQ ID NO: 886 - protein, 485 aa, synthetic construct; identical to SEQ ID NO: 33

SEQ ID NO: 887 - protein, 213 aa, synthetic construct
DIQMTQSPSSLSASVGDRVTITCRASQGISNYLAWYQQKPGKVPKLLIYAASTLQSGVPSRFSGSGSGTDFTLTISSLQPEDVATYYCQKYNSARTFGQGTKVDIKRTVAAPSVFIFPPSDEQLKSGTASVVCLLNNFYPREAKVQWKVDNALQSGNSQESVTEQDSKDSTYSLSSTLTLSKADYEKHKVYACEVTHQGLSSPVTKSFNRGEC

SEQ ID NO: 888 - protein, 447 aa, synthetic construct; identical to SEQ ID NO: 465

SEQ ID NO: 889 - protein, 485 aa, synthetic construct; identical to SEQ ID NO: 403

SEQ ID NO: 890 - protein, 213 aa, synthetic construct; identical to SEQ ID NO: 887

SEQ ID NO: 891 - protein, 447 aa, synthetic construct; identical to SEQ ID NO: 465

SEQ ID NO: 892 - protein, 720 aa, synthetic construct; identical to SEQ ID NO: 472

SEQ ID NO: 893 - protein, 213 aa, synthetic construct; identical to SEQ ID NO: 887

SEQ ID NO: 894 - protein, 447 aa, synthetic construct; identical to SEQ ID NO: 465

SEQ ID NO: 895 - protein, 720 aa, synthetic construct; identical to SEQ ID NO: 472

SEQ ID NO: 896 - protein, 213 aa, synthetic construct; identical to SEQ ID NO: 887

SEQ ID NO: 897 - protein, 447 aa, synthetic construct; identical to SEQ ID NO: 465

SEQ ID NO: 898 - protein, 720 aa, synthetic construct; identical to SEQ ID NO: 478

SEQ ID NO: 899 - protein, 213 aa, synthetic construct; identical to SEQ ID NO: 887

SEQ ID NO: 900 - protein, 447 aa, synthetic construct; identical to SEQ ID NO: 480

SEQ ID NO: 901 - protein, 485 aa, synthetic construct; identical to SEQ ID NO: 421

SEQ ID NO: 902 - protein, 213 aa, synthetic construct; identical to SEQ ID NO: 887

SEQ ID NO: 903 - protein, 447 aa, synthetic construct; identical to SEQ ID NO: 480

SEQ ID NO: 904 - protein, 485 aa, synthetic construct; identical to SEQ ID NO: 424

SEQ ID NO: 905 - protein, 213 aa, synthetic construct; identical to SEQ ID NO: 887

SEQ ID NO: 906 - protein, 447 aa, synthetic construct; identical to SEQ ID NO: 480

SEQ ID NO: 907 - protein, 720 aa, synthetic construct; identical to SEQ ID NO: 487

SEQ ID NO: 908 - protein, 213 aa, synthetic construct; identical to SEQ ID NO: 887

SEQ ID NO: 909 - protein, 447 aa, synthetic construct; identical to SEQ ID NO: 480

SEQ ID NO: 910 - protein, 720 aa, synthetic construct; identical to SEQ ID NO: 487

SEQ ID NO: 911 - protein, 213 aa, synthetic construct; identical to SEQ ID NO: 887

SEQ ID NO: 912 - protein, 447 aa, synthetic construct; identical to SEQ ID NO: 480

SEQ ID NO: 913 - protein, 720 aa, synthetic construct; identical to SEQ ID NO: 493

SEQ ID NO: 914 - protein, 213 aa, synthetic construct; identical to SEQ ID NO: 887

SEQ ID NO: 915 - protein, 447 aa, synthetic construct
EVQLLESGGNLVQPGGSLRLSCAASGFTFGSYVMTWGRQAPGKGLEWVSTISASGGSTYYADSVKGRFTISRDNSKNTLYLQMNSLRAEDTAVYYCAKDKWGKGFDIWGQGTMVTVSSASTKGPSVFPLAPSSKSTSGGTAALGCLVKDYFPEPVTVSWNSGALTSGVHTFPAVLQSSGLYSLSSVVTVPSSSLGTQTYICNVNHKPSDTKVDKKVEPKSCDKTHTCPPCPAPPVAGPSVFLFPPKPKDTLMISRTPEVTCVVVDVKHEDPEVKFNWYVDGVEVHNAKTKPREEEYNSTYRVVSVLTVLHQDWLNGKEYKCKVSNKALPAPIEKTISKAKGQPREPQVYTLPPSREEMTKNQVSLTCDVSGFYPSDIAVEWESDGQPENNYKTTPPVLDSDGSFFLYSKLTVDKSRWEQGDVFSCSVMHEALHNHYTQKSLSLSPGK

SEQ ID NO: 916 - protein, 485 aa, synthetic construct; identical to SEQ ID NO: 33

SEQ ID NO: 917 - protein, 214 aa, synthetic construct
DIQLTQSPSFLSASVGDRVTITCRASQGISSYLAWYQQKPGKAPKLLIYAASTLQSGVPSRFSGSGSGTEFTLTISSLQPEDFATYYCQQLNSYPPTFGGGTKVEIKRTVAAPSVFIFPPSDEQLKSGTASVVCLLNNFYPREAKVQWKVDNALQSGNSQESVTEQDSKDSTYSLSSTLTLSKADYEKHKVYACEVTHQGLSSPVTKSFNRGEC

SEQ ID NO: 918 - protein, 447 aa, synthetic construct; identical to SEQ ID NO: 915

SEQ ID NO: 919 - protein, 485 aa, synthetic construct; identical to SEQ ID NO: 403

SEQ ID NO: 920 - protein, 214 aa, synthetic construct; identical to SEQ ID NO: 917

SEQ ID NO: 921 - protein, 447 aa, synthetic construct; identical to SEQ ID NO: 915

SEQ ID NO: 922 - protein, 720 aa, synthetic construct
EVQLLESGGNLVQPGGSLRLSCAASGFTFGSYVMTWGRQAPGKGLEWVSTISASGGSTYYADSVKGRFTISRDNSKNTLYLQMNSLRAEDTAVYYCAKDKWGKGFDIWGQGTMVTVSSASTKGPSVFPLAPSSKSTSGGTAALGCLVKDYFPEPVTVSWNSGALTSGVHTFPAVLQSSGLYSLSSVVTVPSSSLGTQTYICNVNHKPSNTKVDKKVEPKSCGGGGSGGGGSEVQLVESGGGLVQPGGSLRLSCAASGFTFSTYAMNWVRQAPGKGLEWVGRIRSKYNNYATYYADSVKGRFTISRDDSKNTLYLQMNSLRAEDTAVYYCVRHGNFGDSYVSWFAYWGQGTLVTVSSGKPGSGKPGSGKPGSGKPGSQAVVTQEPSLTVSPGGTVTLTCGSSTGAVTTSNYANWVQQKPGKSPRGLIGGTNKRAPGVPARFSGSLLGGKAALTISGAQPEDEADYYCALWYSNHWVFGGGTKLTVLGGGGSGGGGSKTHTCPPCPAPPVAGPSVFLFPPKPKDTLMISRTPEVTCVVVDVKHEDPEVKFNWYVDGVEVHNAKTKPREEQYNSTYRVVSVLTVLHQDWLNGKEYKCKVSNKALPAPIEKTISKAKGQPREPQVYTLPPSREQMTKNQVKLTCLVKGFYPSDIAVEWESNGQPENNYKTTPPVLDSDGSFFLYSKLTVDKSRWQQGNVFSCSVMHEALHNHYTQKSLSLSPGK

SEQ ID NO: 923 - protein, 214 aa, synthetic construct; identical to SEQ ID NO: 917

SEQ ID NO: 924 - protein, 447 aa, synthetic construct; identical to SEQ ID NO: 915

SEQ ID NO: 925 - protein, 720 aa, synthetic construct; identical to SEQ ID NO: 922

SEQ ID NO: 926 - protein, 214 aa, synthetic construct; identical to SEQ ID NO: 917

SEQ ID NO: 927 - protein, 447 aa, synthetic construct; identical to SEQ ID NO: 915

SEQ ID NO: 928 - protein, 720 aa, synthetic construct
EVQLLESGGNLVQPGGSLRLSCAASGFTFGSYVMTWGRQAPGKGLEWVSTISASGGSTYYADSVKGRFTISRDNSKNTLYLQMNSLRAEDTAVYYCAKDKWGKGFDIWGQGTMVTVSSASTKGPSVFPLAPSSKSTSGGTAALGCLVKDYFPEPVTVSWNSGALTSGVHTFPAVLQSSGLYSLSSVVTVPSSSLGTQTYICNVNHKPSNTKVDKKVEPKSCGGGGSGGGGSQAVVTQEPSLTVSPGGTVTLTCGSSTGAVTTSNYANWVQQKPGKSPRGLIGGTNKRAPGVPARFSGSLLGGKAALTISGAQPEDEADYYCALWYSNHWVFGGGTKLTVLGKPGSGKPGSGKPGSGKPGSEVQLVESGGGLVQPGGSLRLSCAASGFTFSTYAMNWVRQAPGKGLEWVGRIRSKANNYATYYADSVKGRFTISRDDSKNTLYLQMNSLRAEDTAVYYCVRHGNFGDSYVSWFAYWGQGTLVTVSSGGGGSGGGGSKTHTCPPCPAPPVAGPSVFLFPPKPKDTLMISRTPEVTCVVVDVKHEDPEVKFNWYVDGVEVHNAKTKPREEQYNSTYRVVSVLTVLHQDWLNGKEYKCKVSNKALPAPIEKTISKAKGQPREPQVYTLPPSREQMTKNQVKLTCLVKGFYPSDIAVEWESNGQPENNYKTTPPVLDSDGSFFLYSKLTVDKSRWQQGNVFSCSVMHEALHNHYTQKSLSLSPGK

SEQ ID NO: 929 - protein, 214 aa, synthetic construct; identical to SEQ ID NO: 917

SEQ ID NO: 930 - protein, 447 aa, synthetic construct
EVQLLESGGNLVQPGGSLRLSCAASGFTFGSYVMTWGRQAPGKGLEWVSTISASGGSTYYADSVKGRFTISRDNSKNTLYLQMNSLRAEDTAVYYCAKDKWGKGFDIWGQGTMVTVSSASTKGPSVFPLAPSSKSTSGGTAALGCLVKDYFPEPVTVSWNSGALTSGVHTFPAVLQSSGLYSLSSVVTVPSSSLGTQTYICNVNHKPSDTKVDKKVEPKSCDKTHTCPPCPAPPVAGPSVFLFPPKPKDTLMISRTPEVTCVVVDVKHEDPEVKFNWYVDGVEVHNAKTKPREEEYNSTYRVVSVLTVLHQDWLNGKEYKCKVSNKALPAPIEKTISKAKGQPREPQVYTLPPSREEMTKNQVSLTCDVSGFYPSDIAVEWESDGQPENNYKTTPPVLDSDGSFFLYSKLTVDKSRWEQGDVFSCSVLHEALHSHYTQKSLSLSPGK

SEQ ID NO: 931 - protein, 485 aa, synthetic construct; identical to SEQ ID NO: 421

SEQ ID NO: 932 - protein, 214 aa, synthetic construct; identical to SEQ ID NO: 917

SEQ ID NO: 933 - protein, 447 aa, synthetic construct; identical to SEQ ID NO: 930

SEQ ID NO: 934 - protein, 485 aa, synthetic construct; identical to SEQ ID NO: 424

SEQ ID NO: 935 - protein, 214 aa, synthetic construct; identical to SEQ ID NO: 917

SEQ ID NO: 936 - protein, 447 aa, synthetic construct; identical to SEQ ID NO: 930

SEQ ID NO: 937 - protein, 720 aa, synthetic construct
EVQLLESGGNLVQPGGSLRLSCAASGFTFGSYVMTWGRQAPGKGLEWVSTISASGGSTYYADSVKGRFTISRDNSKNTLYLQMNSLRAEDTAVYYCAKDKWGKGFDIWGQGTMVTVSSASTKGPSVFPLAPSSKSTSGGTAALGCLVKDYFPEPVTVSWNSGALTSGVHTFPAVLQSSGLYSLSSVVTVPSSSLGTQTYICNVNHKPSNTKVDKKVEPKSCGGGGSGGGGSEVQLVESGGGLVQPGGSLRLSCAASGFTFSTYAMNWVRQAPGKGLEWVGRIRSKYNNYATYYADSVKGRFTISRDDSKNTLYLQMNSLRAEDTAVYYCVRHGNFGDSYVSWFAYWGQGTLVTVSSGKPGSGKPGSGKPGSGKPGSQAVVTQEPSLTVSPGGTVTLTCGSSTGAVTTSNYANWVQQKPGKSPRGLIGGTNKRAPGVPARFSGSLLGGKAALTISGAQPEDEADYYCALWYSNHWVFGGGTKLTVLGGGGSGGGGSKTHTCPPCPAPPVAGPSVFLFPPKPKDTLMISRTPEVTCVVVDVKHEDPEVKFNWYVDGVEVHNAKTKPREEQYNSTYRVVSVLTVLHQDWLNGKEYKCKVSNKALPAPIEKTISKAKGQPREPQVYTLPPSREQMTKNQVKLTCLVKGFYPSDIAVEWESNGQPENNYKTTPPVLDSDGSFFLYSKLTVDKSRWQQGNVFSCSVLHEALHSHYTQKSLSLSPGK

SEQ ID NO: 938 - protein, 214 aa, synthetic construct; identical to SEQ ID NO: 917

SEQ ID NO: 939 - protein, 447 aa, synthetic construct; identical to SEQ ID NO: 930

SEQ ID NO: 940 - protein, 720 aa, synthetic construct; identical to SEQ ID NO: 937

SEQ ID NO: 941 - protein, 214 aa, synthetic construct; identical to SEQ ID NO: 917

SEQ ID NO: 942 - protein, 447 aa, synthetic construct; identical to SEQ ID NO: 930

SEQ ID NO: 943 - protein, 720 aa, synthetic construct
EVQLLESGGNLVQPGGSLRLSCAASGFTFGSYVMTWGRQAPGKGLEWVSTISASGGSTYYADSVKGRFTISRDNSKNTLYLQMNSLRAEDTAVYYCAKDKWGKGFDIWGQGTMVTVSSASTKGPSVFPLAPSSKSTSGGTAALGCLVKDYFPEPVTVSWNSGALTSGVHTFPAVLQSSGLYSLSSVVTVPSSSLGTQTYICNVNHKPSNTKVDKKVEPKSCGGGGSGGGGSQAVVTQEPSLTVSPGGTVTLTCGSSTGAVTTSNYANWVQQKPGKSPRGLIGGTNKRAPGVPARFSGSLLGGKAALTISGAQPEDEADYYCALWYSNHWVFGGGTKLTVLGKPGSGKPGSGKPGSGKPGSEVQLVESGGGLVQPGGSLRLSCAASGFTFSTYAMNWVRQAPGKGLEWVGRIRSKANNYATYYADSVKGRFTISRDDSKNTLYLQMNSLRAEDTAVYYCVRHGNFGDSYVSWFAYWGQGTLVTVSSGGGGSGGGGSKTHTCPPCPAPPVAGPSVFLFPPKPKDTLMISRTPEVTCVVVDVKHEDPEVKFNWYVDGVEVHNAKTKPREEQYNSTYRVVSVLTVLHQDWLNGKEYKCKVSNKALPAPIEKTISKAKGQPREPQVYTLPPSREQMTKNQVKLTCLVKGFYPSDIAVEWESNGQPENNYKTTPPVLDSDGSFFLYSKLTVDKSRWQQGNVFSCSVLHEALHSHYTQKSLSLSPGK

SEQ ID NO: 944 - protein, 214 aa, synthetic construct; identical to SEQ ID NO: 917

SEQ ID NO: 945 - protein, 451 aa, synthetic construct; identical to SEQ ID NO: 675

SEQ ID NO: 946 - protein, 485 aa, synthetic construct; identical to SEQ ID NO: 33

SEQ ID NO: 947 - protein, 214 aa, synthetic construct
DIQLTQSPSFLSASVGDRVTITCRASQGISSYLAWYQQKPGKAPKLLIYAASTLQSGVPSRFSGSGSGTEFTLTISSLQPEDFATYHCQQLNSYPLTFGGMTKVEIKRTVAAPSVFIFPPSDEQLKSGTASVVCLLNNFYPREAKVQWKVDNALQSGNSQESVTEQDSKDSTYSLSSTLTLSKADYEKHKVYACEVTHQGLSSPVTKSFNRGEC

SEQ ID NO: 948 - protein, 451 aa, synthetic construct; identical to SEQ ID NO: 675

SEQ ID NO: 949 - protein, 485 aa, synthetic construct; identical to SEQ ID NO: 403

SEQ ID NO: 950 - protein, 214 aa, synthetic construct; identical to SEQ ID NO: 947

SEQ ID NO: 951 - protein, 451 aa, synthetic construct; identical to SEQ ID NO: 675

SEQ ID NO: 952 - protein, 724 aa, synthetic construct; identical to SEQ ID NO: 682

SEQ ID NO: 953 - protein, 214 aa, synthetic construct; identical to SEQ ID NO: 947

SEQ ID NO: 954 - protein, 451 aa, synthetic construct; identical to SEQ ID NO: 675

SEQ ID NO: 955 - protein, 724 aa, synthetic construct; identical to SEQ ID NO: 682

SEQ ID NO: 956 - protein, 214 aa, synthetic construct; identical to SEQ ID NO: 947

SEQ ID NO: 957 - protein, 451 aa, synthetic construct; identical to SEQ ID NO: 675

SEQ ID NO: 958 - protein, 724 aa, synthetic construct; identical to SEQ ID NO: 688

SEQ ID NO: 959 - protein, 214 aa, synthetic construct; identical to SEQ ID NO: 947

SEQ ID NO: 960 - protein, 451 aa, synthetic construct; identical to SEQ ID NO: 690

SEQ ID NO: 961 - protein, 485 aa, synthetic construct; identical to SEQ ID NO: 421

SEQ ID NO: 962 - protein, 214 aa, synthetic construct; identical to SEQ ID NO: 947

SEQ ID NO: 963 - protein, 451 aa, synthetic construct; identical to SEQ ID NO: 690

SEQ ID NO: 964 - protein, 485 aa, synthetic construct; identical to SEQ ID NO: 424

SEQ ID NO: 965 - protein, 214 aa, synthetic construct; identical to SEQ ID NO: 947

SEQ ID NO: 966 - protein, 451 aa, synthetic construct; identical to SEQ ID NO: 690

SEQ ID NO: 967 - protein, 724 aa, synthetic construct; identical to SEQ ID NO: 697

SEQ ID NO: 968 - protein, 214 aa, synthetic construct; identical to SEQ ID NO: 947

SEQ ID NO: 969 - protein, 451 aa, synthetic construct; identical to SEQ ID NO: 690

SEQ ID NO: 970 - protein, 724 aa, synthetic construct; identical to SEQ ID NO: 697

SEQ ID NO: 971 - protein, 214 aa, synthetic construct; identical to SEQ ID NO: 947

SEQ ID NO: 972 - protein, 451 aa, synthetic construct; identical to SEQ ID NO: 690

SEQ ID NO: 973 - protein, 724 aa, synthetic construct; identical to SEQ ID NO: 703

SEQ ID NO: 974 - protein, 214 aa, synthetic construct; identical to SEQ ID NO: 947

SEQ ID NO: 975 - protein, 446 aa, synthetic construct
EVQLVESGGGLVQSGGSLRFSCAASGFTFSSHPMNWVRQVPGKGLEWVSSISGSGGSTYYADFVKGRFTISRDNSKNTLYLQMNSLRAEDTAVYYCAKGHNSGWKYWGQGTLVTVSSASTKGPSVFPLAPSSKSTSGGTAALGCLVKDYFPEPVTVSWNSGALTSGVHTFPAVLQSSGLYSLSSVVTVPSSSLGTQTYICNVNHKPSDTKVDKKVEPKSCDKTHTCPPCPAPPVAGPSVFLFPPKPKDTLMISRTPEVTCVVVDVKHEDPEVKFNWYVDGVEVHNAKTKPREEEYNSTYRVVSVLTVLHQDWLNGKEYKCKVSNKALPAPIEKTISKAKGQPREPQVYTLPPSREEMTKNQVSLTCDVSGFYPSDIAVEWESDGQPENNYKTTPPVLDSDGSFFLYSKLTVDKSRWEQGDVFSCSVMHEALHNHYTQKSLSLSPGK

SEQ ID NO: 976 - protein, 485 aa, synthetic construct; identical to SEQ ID NO: 33

SEQ ID NO: 977 - protein, 214 aa, synthetic construct
DIQLTQSPSFLSASVGDRVTITCRASQGISSYLAWYQQKPGKAPKLLIYAASTLQSGVPSRFSGSGSGTEFTLTISSLQPEDFATYYCQQLNSYPPTFGQGTKVDIKRTVAAPSVFIFPPSDEQLKSGTASVVCLLNNFYPREAKVQWKVDNALQSGNSQESVTEQDSKDSTYSLSSTLTLSKADYEKHKVYACEVTHQGLSSPVTKSFNRGEC

SEQ ID NO: 978 - protein, 446 aa, synthetic construct; identical to SEQ ID NO: 975

SEQ ID NO: 979 - protein, 485 aa, synthetic construct; identical to SEQ ID NO: 403

SEQ ID NO: 980 - protein, 214 aa, synthetic construct; identical to SEQ ID NO: 977

SEQ ID NO: 981 - protein, 446 aa, synthetic construct; identical to SEQ ID NO: 975

SEQ ID NO: 982 - protein, 719 aa, synthetic construct
EVQLVESGGGLVQSGGSLRFSCAASGFTFSSHPMNWVRQVPGKGLEWVSSISGSGGSTYYADFVKGRFTISRDNSKNTLYLQMNSLRAEDTAVYYCAKGHNSGWKYWGQGTLVTVSSASTKGPSVFPLAPSSKSTSGGTAALGCLVKDYFPEPVTVSWNSGALTSGVHTFPAVLQSSGLYSLSSVVTVPSSSLGTQTYICNVNHKPSNTKVDKKVEPKSCGGGGSGGGGSEVQLVESGGGLVQPGGSLRLSCAASGFTFSTYAMNWVRQAPGKGLEWVGRIRSKYNNYATYYADSVKGRFTISRDDSKNTLYLQMNSLRAEDTAVYYCVRHGNFGDSYVSWFAYWGQGTLVTVSSGKPGSGKPGSGKPGSGKPGSQAVVTQEPSLTVSPGGTVTLTCGSSTGAVTTSNYANWVQQKPGKSPRGLIGGTNKRAPGVPARFSGSLLGGKAALTISGAQPEDEADYYCALWYSNHWVFGGGTKLTVLGGGGSGGGGSKTHTCPPCPAPPVAGPSVFLFPPKPKDTLMISRTPEVTCVVVDVKHEDPEVKFNWYVDGVEVHNAKTKPREEQYNSTYRVVSVLTVLHQDWLNGKEYKCKVSNKALPAPIEKTISKAKGQPREPQVYTLPPSREQMTKNQVKLTCLVKGFYPSDIAVEWESNGQPENNYKTTPPVLDSDGSFFLYSKLTVDKSRWQQGNVFSCSVMHEALHNHYTQKSLSLSPGK

SEQ ID NO: 983 - protein, 214 aa, synthetic construct; identical to SEQ ID NO: 977

SEQ ID NO: 984 - protein, 214 aa, synthetic construct; identical to SEQ ID NO: 977

SEQ ID NO: 985 - protein, 719 aa, synthetic construct; identical to SEQ ID NO: 982

SEQ ID NO: 986 - protein, 214 aa, synthetic construct; identical to SEQ ID NO: 977

SEQ ID NO: 987 - protein, 446 aa, synthetic construct; identical to SEQ ID NO: 975

SEQ ID NO: 988 - protein, 719 aa, synthetic construct
EVQLVESGGGLVQSGGSLRFSCAASGFTFSSHPMNWVRQVPGKGLEWVSSISGSGGSTYYADFVKGRFTISRDNSKNTLYLQMNSLRAEDTAVYYCAKGHNSGWKYWGQGTLVTVSSASTKGPSVFPLAPSSKSTSGGTAALGCLVKDYFPEPVTVSWNSGALTSGVHTFPAVLQSSGLYSLSSVVTVPSSSLGTQTYICNVNHKPSNTKVDKKVEPKSCGGGGSGGGGSQAVVTQEPSLTVSPGGTVTLTCGSSTGAVTTSNYANWVQQKPGKSPRGLIGGTNKRAPGVPARFSGSLLGGKAALTISGAQPEDEADYYCALWYSNHWVFGGGTKLTVLGKPGSGKPGSGKPGSGKPGSEVQLVESGGGLVQPGGSLRLSCAASGFTFSTYAMNWVRQAPGKGLEWVGRIRSKANNYATYYADSVKGRFTISRDDSKNTLYLQMNSLRAEDTAVYYCVRHGNFGDSYVSWFAYWGQGTLVTVSSGGGGSGGGGSKTHTCPPCPAPPVAGPSVFLFPPKPKDTLMISRTPEVTCVVVDVKHEDPEVKFNWYVDGVEVHNAKTKPREEQYNSTYRVVSVLTVLHQDWLNGKEYKCKVSNKALPAPIEKTISKAKGQPREPQVYTLPPSREQMTKNQVKLTCLVKGFYPSDIAVEWESNGQPENNYKTTPPVLDSDGSFFLYSKLTVDKSRWQQGNVFSCSVMHEALHNHYTQKSLSLSPGK

SEQ ID NO: 989 - protein, 214 aa, synthetic construct; identical to SEQ ID NO: 977

SEQ ID NO: 990 - protein, 446 aa, synthetic construct
EVQLVESGGGLVQSGGSLRFSCAASGFTFSSHPMNWVRQVPGKGLEWVSSISGSGGSTYYADFVKGRFTISRDNSKNTLYLQMNSLRAEDTAVYYCAKGHNSGWKYWGQGTLVTVSSASTKGPSVFPLAPSSKSTSGGTAALGCLVKDYFPEPVTVSWNSGALTSGVHTFPAVLQSSGLYSLSSVVTVPSSSLGTQTYICNVNHKPSDTKVDKKVEPKSCDKTHTCPPCPAPPVAGPSVFLFPPKPKDTLMISRTPEVTCVVVDVKHEDPEVKFNWYVDGVEVHNAKTKPREEEYNSTYRVVSVLTVLHQDWLNGKEYKCKVSNKALPAPIEKTISKAKGQPREPQVYTLPPSREEMTKNQVSLTCDVSGFYPSDIAVEWESDGQPENNYKTTPPVLDSDGSFFLYSKLTVDKSRWEQGDVFSCSVLHEALHSHYTQKSLSLSPGK

SEQ ID NO: 991 - protein, 485 aa, synthetic construct; identical to SEQ ID NO: 421

SEQ ID NO: 992 - protein, 214 aa, synthetic construct; identical to SEQ ID NO: 977

SEQ ID NO: 993 - protein, 446 aa, synthetic construct; identical to SEQ ID NO: 990

SEQ ID NO: 994 - protein, 485 aa, synthetic construct; identical to SEQ ID NO: 424

SEQ ID NO: 995 - protein, 214 aa, synthetic construct; identical to SEQ ID NO: 977

SEQ ID NO: 996 - protein, 446 aa, synthetic construct; identical to SEQ ID NO: 990

SEQ ID NO: 997 - protein, 719 aa, synthetic construct
EVQLVESGGGLVQSGGSLRFSCAASGFTFSSHPMNWVRQVPGKGLEWVSSISGSGGSTYYADFVKGRFTISRDNSKNTLYLQMNSLRAEDTAVYYCAKGHNSGWKYWGQGTLVTVSSASTKGPSVFPLAPSSKSTSGGTAALGCLVKDYFPEPVTVSWNSGALTSGVHTFPAVLQSSGLYSLSSVVTVPSSSLGTQTYICNVNHKPSNTKVDKKVEPKSCGGGGSGGGGSEVQLVESGGGLVQPGGSLRLSCAASGFTFSTYAMNWVRQAPGKGLEWVGRIRSKYNNYATYYADSVKGRFTISRDDSKNTLYLQMNSLRAEDTAVYYCVRHGNFGDSYVSWFAYWGQGTLVTVSSGKPGSGKPGSGKPGSGKPGSQAVVTQEPSLTVSPGGTVTLTCGSSTGAVTTSNYANWVQQKPGKSPRGLIGGTNKRAPGVPARFSGSLLGGKAALTISGAQPEDEADYYCALWYSNHWVFGGGTKLTVLGGGGSGGGGSKTHTCPPCPAPPVAGPSVFLFPPKPKDTLMISRTPEVTCVVVDVKHEDPEVKFNWYVDGVEVHNAKTKPREEQYNSTYRVVSVLTVLHQDWLNGKEYKCKVSNKALPAPIEKTISKAKGQPREPQVYTLPPSREQMTKNQVKLTCLVKGFYPSDIAVEWESNGQPENNYKTTPPVLDSDGSFFLYSKLTVDKSRWQQGNVFSCSVLHEALHSHYTQKSLSLSPGK

SEQ ID NO: 998 - protein, 214 aa, synthetic construct; identical to SEQ ID NO: 977

SEQ ID NO: 999 - protein, 446 aa, synthetic construct; identical to SEQ ID NO: 990

SEQ ID NO: 1000 - protein, 719 aa, synthetic construct; identical to SEQ ID NO: 997

SEQ ID NO: 1001 - protein, 214 aa, synthetic construct; identical to SEQ ID NO: 977

SEQ ID NO: 1002 - protein, 446 aa, synthetic construct; identical to SEQ ID NO: 990

SEQ ID NO: 1003 - protein, 719 aa, synthetic construct
EVQLVESGGGLVQSGGSLRFSCAASGFTFSSHPMNWVRQVPGKGLEWVSSISGSGGSTYYADFVKGRFTISRDNSKNTLYLQMNSLRAEDTAVYYCAKGHNSGWKYWGQGTLVTVSSASTKGPSVFPLAPSSKSTSGGTAALGCLVKDYFPEPVTVSWNSGALTSGVHTFPAVLQSSGLYSLSSVVTVPSSSLGTQTYICNVNHKPSNTKVDKKVEPKSCGGGGSGGGGSQAVVTQEPSLTVSPGGTVTLTCGSSTGAVTTSNYANWVQQKPGKSPRGLIGGTNKRAPGVPARFSGSLLGGKAALTISGAQPEDEADYYCALWYSNHWVFGGGTKLTVLGKPGSGKPGSGKPGSGKPGSEVQLVESGGGLVQPGGSLRLSCAASGFTFSTYAMNWVRQAPGKGLEWVGRIRSKANNYATYYADSVKGRFTISRDDSKNTLYLQMNSLRAEDTAVYYCVRHGNFGDSYVSWFAYWGQGTLVTVSSGGGGSGGGGSKTHTCPPCPAPPVAGPSVFLFPPKPKDTLMISRTPEVTCVVVDVKHEDPEVKFNWYVDGVEVHNAKTKPREEQYNSTYRVVSVLTVLHQDWLNGKEYKCKVSNKALPAPIEKTISKAKGQPREPQVYTLPPSREQMTKNQVKLTCLVKGFYPSDIAVEWESNGQPENNYKTTPPVLDSDGSFFLYSKLTVDKSRWQQGNVFSCSVLHEALHSHYTQKSLSLSPGK

SEQ ID NO: 1004 - protein, 214 aa, synthetic construct; identical to SEQ ID NO: 977

SEQ ID NO: 1005 - protein, 447 aa, synthetic construct
EVQLLESGGGLVQPGGSLSLSCAASGFTFSRYGMHWVRQAPGKGLEWVSAISASGGSTYYADSVKGRFTISRDNSKNTLYLQMNSLRAEDTAVYYCAKDKWGYAFDIWGQGTTVTVSSASTKGPSVFPLAPSSKSTSGGTAALGCLVKDYFPEPVTVSWNSGALTSGVHTFPAVLQSSGLYSLSSVVTVPSSSLGTQTYICNVNHKPSDTKVDKKVEPKSCDKTHTCPPCPAPPVAGPSVFLFPPKPKDTLMISRTPEVTCVVVDVKHEDPEVKFNWYVDGVEVHNAKTKPREEEYNSTYRVVSVLTVLHQDWLNGKEYKCKVSNKALPAPIEKTISKAKGQPREPQVYTLPPSREEMTKNQVSLTCDVSGFYPSDIAVEWESDGQPENNYKTTPPVLDSDGSFFLYSKLTVDKSRWEQGDVFSCSVMHEALHNHYTQKSLSLSPGK

SEQ ID NO: 1006 - protein, 485 aa, synthetic construct; identical to SEQ ID NO: 33

SEQ ID NO: 1007 - protein, 213 aa, synthetic construct
DIQMTQSPSTLSASVGDRVTITCRASQSISNWLAWYQQKPGKAPKLLIYKASSLESGVPSRFSGSGSGTEFTLTISSLQPDDFATYYCLQYNHYSTFGQGTKVDIKRTVAAPSVFIFPPSDEQLKSGTASVVCLLNNFYPREAKVQWKVDNALQSGNSQESVTEQDSKDSTYSLSSTLTLSKADYEKHKVYACEVTHQGLSSPVTKSFNRGEC

SEQ ID NO: 1008 - protein, 447 aa, synthetic construct; identical to SEQ ID NO: 1005

SEQ ID NO: 1009 - protein, 485 aa, synthetic construct; identical to SEQ ID NO: 403

SEQ ID NO: 1010 - protein, 213 aa, synthetic construct; identical to SEQ ID NO: 1007

SEQ ID NO: 1011 - protein, 447 aa, synthetic construct; identical to SEQ ID NO: 1005

SEQ ID NO: 1012 - protein, 720 aa, synthetic construct
EVQLLESGGGLVQPGGSLSLSCAASGFTFSRYGMHWVRQAPGKGLEWVSAISASGGSTYYADSVKGRFTISRDNSKNTLYLQMNSLRAEDTAVYYCAKDKWGYAFDIWGQGTTVTVSSASTKGPSVFPLAPSSKSTSGGTAALGCLVKDYFPEPVTVSWNSGALTSGVHTFPAVLQSSGLYSLSSVVTVPSSSLGTQTYICNVNHKPSNTKVDKKVEPKSCGGGGSGGGGSEVQLVESGGGLVQPGGSLRLSCAASGFTFSTYAMNWVRQAPGKGLEWVGRIRSKYNNYATYYADSVKGRFTISRDDSKNTLYLQMNSLRAEDTAVYYCVRHGNFGDSYVSWFAYWGQGTLVTVSSGKPGSGKPGSGKPGSGKPGSQAVVTQEPSLTVSPGGTVTLTCGSSTGAVTTSNYANWVQQKPGKSPRGLIGGTNKRAPGVPARFSGSLLGGKAALTISGAQPEDEADYYCALWYSNHWVFGGGTKLTVLGGGGSGGGGSKTHTCPPCPAPPVAGPSVFLFPPKPKDTLMISRTPEVTCVVVDVKHEDPEVKFNWYVDGVEVHNAKTKPREEQYNSTYRVVSVLTVLHQDWLNGKEYKCKVSNKALPAPIEKTISKAKGQPREPQVYTLPPSREQMTKNQVKLTCLVKGFYPSDIAVEWESNGQPENNYKTTPPVLDSDGSFFLYSKLTVDKSRWQQGNVFSCSVMHEALHNHYTQKSLSLSPGK

SEQ ID NO: 1013 - protein, 213 aa, synthetic construct; identical to SEQ ID NO: 1007

SEQ ID NO: 1014 - protein, 447 aa, synthetic construct; identical to SEQ ID NO: 1005

SEQ ID NO: 1015 - protein, 720 aa, synthetic construct; identical to SEQ ID NO: 1012

SEQ ID NO: 1016 - protein, 213 aa, synthetic construct; identical to SEQ ID NO: 1007

SEQ ID NO: 1017 - protein, 447 aa, synthetic construct; identical to SEQ ID NO: 1005

SEQ ID NO: 1018 - protein, 720 aa, synthetic construct
EVQLLESGGGLVQPGGSLSLSCAASGFTFSRYGMHWVRQAPGKGLEWVSAISASGGSTYYADSVKGRFTISRDNSKNTLYLQMNSLRAEDTAVYYCAKDKWGYAFDIWGQGTTVTVSSASTKGPSVFPLAPSSKSTSGGTAALGCLVKDYFPEPVTVSWNSGALTSGVHTFPAVLQSSGLYSLSSVVTVPSSSLGTQTYICNVNHKPSNTKVDKKVEPKSCGGGGSGGGGSQAVVTQEPSLTVSPGGTVTLTCGSSTGAVTTSNYANWVQQKPGKSPRGLIGGTNKRAPGVPARFSGSLLGGKAALTISGAQPEDEADYYCALWYSNHWVFGGGTKLTVLGKPGSGKPGSGKPGSGKPGSEVQLVESGGGLVQPGGSLRLSCAASGFTFSTYAMNWVRQAPGKGLEWVGRIRSKANNYATYYADSVKGRFTISRDDSKNTLYLQMNSLRAEDTAVYYCVRHGNFGDSYVSWFAYWGQGTLVTVSSGGGGSGGGGSKTHTCPPCPAPPVAGPSVFLFPPKPKDTLMISRTPEVTCVVVDVKHEDPEVKFNWYVDGVEVHNAKTKPREEQYNSTYRVVSVLTVLHQDWLNGKEYKCKVSNKALPAPIEKTISKAKGQPREPQVYTLPPSREQMTKNQVKLTCLVKGFYPSDIAVEWESNGQPENNYKTTPPVLDSDGSFFLYSKLTVDKSRWQQGNVFSCSVMHEALHNHYTQKSLSLSPGK

SEQ ID NO: 1019 - protein, 213 aa, synthetic construct; identical to SEQ ID NO: 1007

SEQ ID NO: 1020 - protein, 447 aa, synthetic construct
EVQLLESGGGLVQPGGSLSLSCAASGFTFSRYGMHWVRQAPGKGLEWVSAISASGGSTYYADSVKGRFTISRDNSKNTLYLQMNSLRAEDTAVYYCAKDKWGYAFDIWGQGTTVTVSSASTKGPSVFPLAPSSKSTSGGTAALGCLVKDYFPEPVTVSWNSGALTSGVHTFPAVLQSSGLYSLSSVVTVPSSSLGTQTYICNVNHKPSDTKVDKKVEPKSCDKTHTCPPCPAPPVAGPSVFLFPPKPKDTLMISRTPEVTCVVVDVKHEDPEVKFNWYVDGVEVHNAKTKPREEEYNSTYRVVSVLTVLHQDWLNGKEYKCKVSNKALPAPIEKTISKAKGQPREPQVYTLPPSREEMTKNQVSLTCDVSGFYPSDIAVEWESDGQPENNYKTTPPVLDSDGSFFLYSKLTVDKSRWEQGDVFSCSVLHEALHSHYTQKSLSLSPGK

SEQ ID NO: 1021 - protein, 485 aa, synthetic construct; identical to SEQ ID NO: 421

SEQ ID NO: 1022 - protein, 213 aa, synthetic construct; identical to SEQ ID NO: 1007

SEQ ID NO: 1023 - protein, 447 aa, synthetic construct; identical to SEQ ID NO: 1020

SEQ ID NO: 1024 - protein, 485 aa, synthetic construct; identical to SEQ ID NO: 424

SEQ ID NO: 1025 - protein, 213 aa, synthetic construct; identical to SEQ ID NO: 1007

SEQ ID NO: 1026 - protein, 447 aa, synthetic construct; identical to SEQ ID NO: 1020

SEQ ID NO: 1027 - protein, 720 aa, synthetic construct
EVQLLESGGGLVQPGGSLSLSCAASGFTFSRYGMHWVRQAPGKGLEWVSAISASGGSTYYADSVKGRFTISRDNSKNTLYLQMNSLRAEDTAVYYCAKDKWGYAFDIWGQGTTVTVSSASTKGPSVFPLAPSSKSTSGGTAALGCLVKDYFPEPVTVSWNSGALTSGVHTFPAVLQSSGLYSLSSVVTVPSSSLGTQTYICNVNHKPSNTKVDKKVEPKSCGGGGSGGGGSEVQLVESGGGLVQPGGSLRLSCAASGFTFSTYAMNWVRQAPGKGLEWVGRIRSKYNNYATYYADSVKGRFTISRDDSKNTLYLQMNSLRAEDTAVYYCVRHGNFGDSYVSWFAYWGQGTLVTVSSGKPGSGKPGSGKPGSGKPGSQAVVTQEPSLTVSPGGTVTLTCGSSTGAVTTSNYANWVQQKPGKSPRGLIGGTNKRAPGVPARFSGSLLGGKAALTISGAQPEDEADYYCALWYSNHWVFGGGTKLTVLGGGGSGGGGSKTHTCPPCPAPPVAGPSVFLFPPKPKDTLMISRTPEVTCVVVDVKHEDPEVKFNWYVDGVEVHNAKTKPREEQYNSTYRVVSVLTVLHQDWLNGKEYKCKVSNKALPAPIEKTISKAKGQPREPQVYTLPPSREQMTKNQVKLTCLVKGFYPSDIAVEWESNGQPENNYKTTPPVLDSDGSFFLYSKLTVDKSRWQQGNVFSCSVLHEALHSHYTQKSLSLSPGK

SEQ ID NO: 1028 - protein, 213 aa, synthetic construct; identical to SEQ ID NO: 1007

SEQ ID NO: 1029 - protein, 447 aa, synthetic construct; identical to SEQ ID NO: 1020

SEQ ID NO: 1030 - protein, 720 aa, synthetic construct; identical to SEQ ID NO: 1027

SEQ ID NO: 1031 - protein, 213 aa, synthetic construct; identical to SEQ ID NO: 1007

SEQ ID NO: 1032 - protein, 447 aa, synthetic construct; identical to SEQ ID NO: 1020

SEQ ID NO: 1033 - protein, 720 aa, synthetic construct
EVQLLESGGGLVQPGGSLSLSCAASGFTFSRYGMHWVRQAPGKGLEWVSAISASGGSTYYADSVKGRFTISRDNSKNTLYLQMNSLRAEDTAVYYCAKDKWGYAFDIWGQGTTVTVSSASTKGPSVFPLAPSSKSTSGGTAALGCLVKDYFPEPVTVSWNSGALTSGVHTFPAVLQSSGLYSLSSVVTVPSSSLGTQTYICNVNHKPSNTKVDKKVEPKSCGGGGSGGGGSQAVVTQEPSLTVSPGGTVTLTCGSSTGAVTTSNYANWVQQKPGKSPRGLIGGTNKRAPGVPARFSGSLLGGKAALTISGAQPEDEADYYCALWYSNHWVFGGGTKLTVLGKPGSGKPGSGKPGSGKPGSEVQLVESGGGLVQPGGSLRLSCAASGFTFSTYAMNWVRQAPGKGLEWVGRIRSKANNYATYYADSVKGRFTISRDDSKNTLYLQMNSLRAEDTAVYYCVRHGNFGDSYVSWFAYWGQGTLVTVSSGGGGSGGGGSKTHTCPPCPAPPVAGPSVFLFPPKPKDTLMISRTPEVTCVVVDVKHEDPEVKFNWYVDGVEVHNAKTKPREEQYNSTYRVVSVLTVLHQDWLNGKEYKCKVSNKALPAPIEKTISKAKGQPREPQVYTLPPSREQMTKNQVKLTCLVKGFYPSDIAVEWESNGQPENNYKTTPPVLDSDGSFFLYSKLTVDKSRWQQGNVFSCSVLHEALHSHYTQKSLSLSPGK

SEQ ID NO: 1034 - protein, 213 aa, synthetic construct; identical to SEQ ID NO: 1007

What is claimed is:

1. A bispecific antibody comprising:
a) a thymic stromal lymphopoietin receptor (TSLPR) binding domain comprising i) a first variable heavy domain (VH1), and ii) a first variable light domain (VL1); and
b) a CD3 epsilon (CD3e) binding domain comprising i) a second variable heavy domain (VH2), and ii) a second variable light domain (VL2).

2. The bispecific antibody according to claim 1, wherein VH1 and VL1 are selected from one of the following:
(1) (i) a VH1 comprising a vhCDR1, a vhCDR2, and a vhCDR3 having an amino acid sequence of a vhCDR1, a vhCDR2, and a vhCDR3, respectively, of a VH having an amino acid sequence of SEQ ID NO:7 or a variant thereof; and (ii) a VL1 comprising a vlCDR1, a vlCDR2, and a vlCDR3 having an amino acid sequence of a vlCDR1, a vlCDR2, and a vlCDR3, respectively, of a VL having an amino acid sequence of SEQ ID NO: 10 or a variant thereof; or
(2) (i) a VH1 comprising a vhCDR1, a vhCDR2, and a vhCDR3 having an amino acid sequence of a vhCDR1, a vhCDR2, and a vhCDR3, respectively, of a VH having an amino acid sequence of SEQ ID NO:8 or a variant thereof; and (ii) a VL1 comprising a vlCDR1, a vlCDR2, and a vlCDR3 having an amino acid sequence of a vlCDR1, a vlCDR2, and a vlCDR3, respectively, of a VL having an amino acid sequence of SEQ ID NO:11 or a variant thereof; or
(3) (i) a VH1 comprising a vhCDR1, a vhCDR2, and a vhCDR3 having an amino acid sequence of a vhCDR1, a vhCDR2, and a vhCDR3, respectively, of a VH having an amino acid sequence of SEQ ID NO:9 or a variant thereof; and (ii) a VL1 comprising a vlCDR1, a vlCDR2, and a vlCDR3 having an amino acid sequence of a vlCDR1, a vlCDR2, and a vlCDR3, respectively, of a VL having an amino acid sequence of SEQ ID NO:12 or a variant thereof; or
(4) (i) a VH1 comprising a vhCDR1, a vhCDR2, and a vhCDR3 having an amino acid sequence of a vhCDR1, a vhCDR2, and a vhCDR3, respectively, of a VH having an amino acid sequence of SEQ ID NO:76 or a variant thereof; and (ii) a VL1 comprising a vlCDR1, a vlCDR2, and a vlCDR3 having an amino acid sequence of a vlCDR1, a vlCDR2, and a vlCDR3, respectively, of a VL having an amino acid sequence of SEQ ID NO:148 or a variant thereof; or
(5) (i) a VH1 comprising a vhCDR1, a vhCDR2, and a vhCDR3 having an amino acid sequence of a vhCDR1, a vhCDR2, and a vhCDR3, respectively, of a VH having an amino acid sequence of SEQ ID NO:77 or a variant thereof; and (ii) a VL1 comprising a vlCDR1, a vlCDR2, and a vlCDR3 having an amino acid sequence of a vlCDR1, a vlCDR2, and a vlCDR3, respectively, of a VL having an amino acid sequence of SEQ ID NO: 149 or a variant thereof; or
(6) (i) a VH1 comprising a vhCDR1, a vhCDR2, and a vhCDR3 having an amino acid sequence of a vhCDR1, a vhCDR2, and a vhCDR3, respectively, of a VH having an amino acid sequence of SEQ ID NO:78 or a variant thereof; and (ii) a VL1 comprising a vlCDR1, a vlCDR2, and a vlCDR3 having an amino acid sequence of a vlCDR1, a vlCDR2, and a vlCDR3, respectively, of a VL having an amino acid sequence of SEQ ID NO: 150 or a variant thereof; or
(7) (i) a VH1 comprising a vhCDR1, a vhCDR2, and a vhCDR3 having an amino acid sequence of a vhCDR1, a vhCDR2, and a vhCDR3, respectively, of a VH having an amino acid sequence of SEQ ID NO:79 or a variant thereof; and (ii) a VL1 comprising a vlCDR1, a vlCDR2, and a vlCDR3 having an amino acid sequence of a vlCDR1, a vlCDR2, and a vlCDR3, respectively, of a VL having an amino acid sequence of SEQ ID NO:151 or a variant thereof; or
(8) (i) a VH1 comprising a vhCDR1, a vhCDR2, and a vhCDR3 having an amino acid sequence of a vhCDR1, a vhCDR2, and a vhCDR3, respectively, of a VH having an amino acid sequence of SEQ ID NO:80 or a variant thereof; and (ii) a VL1 comprising a vlCDR1, a vlCDR2, and a vlCDR3 having an amino acid sequence of a vlCDR1, a vlCDR2, and a vlCDR3, respectively, of a VL having an amino acid sequence of SEQ ID NO:152 or a variant thereof; or
(9) (i) a VH1 comprising a vhCDR1, a vhCDR2, and a vhCDR3 having an amino acid sequence of a vhCDR1, a vhCDR2, and a vhCDR3, respectively, of a VH having an amino acid sequence of SEQ ID NO:81 or a variant thereof; and (ii) a VL1 comprising a vlCDR1, a vlCDR2, and a vlCDR3 having an amino acid sequence of a vlCDR1, a vlCDR2, and a vlCDR3, respectively, of a VL having an amino acid sequence of SEQ ID NO:153 or a variant thereof; or
(10) (i) a VH1 comprising a vhCDR1, a vhCDR2, and a vhCDR3 having an amino acid sequence of a vhCDR1, a vhCDR2, and a vhCDR3, respectively, of a VH having an amino acid sequence of SEQ ID NO:82 or a variant thereof; and (ii) a VL1 comprising a vlCDR1, a vlCDR2, and a vlCDR3 having an amino acid sequence of a vlCDR1, a vlCDR2, and a vlCDR3, respectively, of a VL having an amino acid sequence of SEQ ID NO: 154 or a variant thereof; or
(11) (i) a VH1 comprising a vhCDR1, a vhCDR2, and a vhCDR3 having an amino acid sequence of a vhCDR1, a vhCDR2, and a vhCDR3, respectively, of a VH having an amino acid sequence of SEQ ID NO:83 or a variant thereof; and (ii) a VL1 comprising a vlCDR1, a vlCDR2, and a vlCDR3 having an amino acid sequence of a vlCDR1, a vlCDR2, and a vlCDR3, respectively, of a VL having an amino acid sequence of SEQ ID NO: 155 or a variant thereof; or
(12) (i) a VH1 comprising a vhCDR1, a vhCDR2, and a vhCDR3 having an amino acid sequence of a vhCDR1, a vhCDR2, and a vhCDR3, respectively, of a VH having an amino acid sequence of SEQ ID NO:84 or a variant thereof; and (ii) a VL1 comprising a vlCDR1, a vlCDR2, and a vlCDR3 having an amino acid sequence of a vlCDR1, a vlCDR2, and a vlCDR3, respectively, of a VL having an amino acid sequence of SEQ ID NO: 156 or a variant thereof; or
(13) (i) a VH1 comprising a vhCDR1, a vhCDR2, and a vhCDR3 having an amino acid sequence of a vhCDR1, a vhCDR2, and a vhCDR3, respectively, of a VH having an amino acid sequence of SEQ ID NO:85 or a variant thereof; and (ii) a VL1 comprising a vlCDR1, a vlCDR2, and a vlCDR3 having an amino acid sequence of a vlCDR1, a vlCDR2, and a vlCDR3, respectively, of a VL having an amino acid sequence of SEQ ID NO: 157 or a variant thereof; or
(14) (i) a VH1 comprising a vhCDR1, a vhCDR2, and a vhCDR3 having an amino acid sequence of a vhCDR1, a vhCDR2, and a vhCDR3, respectively, of a VH having an amino acid sequence of SEQ ID NO:86 or a variant thereof; and (ii) a VL1 comprising a vlCDR1, a vlCDR2, and a vlCDR3 having an amino acid sequence of a vlCDR1, a vlCDR2, and a vlCDR3, respectively, of a VL having an amino acid sequence of SEQ ID NO:158 or a variant thereof; or
(15) (i) a VH1 comprising a vhCDR1, a vhCDR2, and a vhCDR3 having an amino acid sequence of a vhCDR1, a vhCDR2, and a vhCDR3, respectively, of a VH having an amino acid sequence of SEQ ID NO:87 or a variant thereof; and (ii) a VL1 comprising a vlCDR1, a vlCDR2, and a vlCDR3 having an amino acid sequence of a vlCDR1, a vlCDR2, and a vlCDR3, respectively, of a VL having an amino acid sequence of SEQ ID NO: 159 or a variant thereof; or
(16) (i) a VH1 comprising a vhCDR1, a vhCDR2, and a vhCDR3 having an amino acid sequence of a vhCDR1, a vhCDR2, and a vhCDR3, respectively, of a VH having an amino acid sequence of SEQ ID NO:88 or a variant thereof; and (ii) a VL1 comprising a vlCDR1, a vlCDR2, and a vlCDR3 having an amino acid sequence of a vlCDR1, a vlCDR2, and a vlCDR3, respectively, of a VL having an amino acid sequence of SEQ ID NO: 160 or a variant thereof; or
(17) (i) a VH1 comprising a vhCDR1, a vhCDR2, and a vhCDR3 having an amino acid sequence of a vhCDR1, a vhCDR2, and a vhCDR3, respectively, of a VH having an amino acid sequence of SEQ ID NO:89 or a variant thereof; and (ii) a VL1 comprising a vlCDR1, a vlCDR2, and a vlCDR3 having an amino acid sequence of a vlCDR1, a vlCDR2, and a vlCDR3, respectively, of a VL having an amino acid sequence of SEQ ID NO:161 or a variant thereof; or
(18) (i) a VH1 comprising a vhCDR1, a vhCDR2, and a vhCDR3 having an amino acid sequence of a vhCDR1, a vhCDR2, and a vhCDR3, respectively, of a VH having an amino acid sequence of SEQ ID NO:90 or a variant thereof; and (ii) a VL1 comprising a vlCDR1, a vlCDR2, and a vlCDR3 having an amino acid sequence of a vlCDR1, a vlCDR2, and a vlCDR3, respectively, of a VL having an amino acid sequence of SEQ ID NO: 162 or a variant thereof; or
(19) (i) a VH1 comprising a vhCDR1, a vhCDR2, and a vhCDR3 having an amino acid sequence of a vhCDR1, a vhCDR2, and a vhCDR3, respectively, of a VH having an amino acid sequence of SEQ ID NO:91 or a variant thereof; and (ii) a VL1 comprising a vlCDR1, a vlCDR2, and a vlCDR3 having an amino acid sequence of a vlCDR1, a vlCDR2, and a vlCDR3, respectively, of a VL having an amino acid sequence of SEQ ID NO: 163 or a variant thereof; or
(20) (i) a VH1 comprising a vhCDR1, a vhCDR2, and a vhCDR3 having an amino acid sequence of a vhCDR1, a vhCDR2, and a vhCDR3, respectively, of a VH having an amino acid sequence of SEQ ID NO:92 or a variant thereof; and (ii) a VL1 comprising a vlCDR1, a vlCDR2, and a vlCDR3 having an amino acid sequence of a vlCDR1, a vlCDR2, and a vlCDR3, respectively, of a VL having an amino acid sequence of SEQ ID NO: 164 or a variant thereof; or
(21) (i) a VH1 comprising a vhCDR1, a vhCDR2, and a vhCDR3 having an amino acid sequence of a vhCDR1, a vhCDR2, and a vhCDR3, respectively, of a VH having an amino acid sequence of SEQ ID NO:93 or a variant thereof; and (ii) a VL1 comprising a vlCDR1, a vlCDR2, and a vlCDR3 having an amino acid sequence of a vlCDR1, a vlCDR2, and a vlCDR3, respectively, of a VL having an amino acid sequence of SEQ ID NO: 165 or a variant thereof.

3. The bispecific antibody according to claim 2, wherein VH1 and VL1 are selected from the following:
(1) (i) a VH1 having an amino acid sequence of SEQ ID NO:7 or a variant thereof; and (ii) a VL1 having an amino acid sequence of SEQ ID NO:10 or a variant thereof; or
(2) (i) a VH1 having an amino acid sequence of SEQ ID NO:8 or a variant thereof; and (ii) a VL1 having an amino acid sequence of SEQ ID NO:11 or a variant thereof; or
(3) (i) a VH1 having an amino acid sequence of SEQ ID NO:9 or a variant thereof; and (ii) a VL1 having an amino acid sequence of SEQ ID NO: 12 or a variant thereof; or
(4) (i) a VH1 having an amino acid sequence of SEQ ID NO:76 or a variant thereof; and (ii) a VL1 having an amino acid sequence of SEQ ID NO:148 or a variant thereof; or
(5) (i) a VH1 having an amino acid sequence of SEQ ID NO:77 or a variant thereof; and (ii) a VL1 having an amino acid sequence of SEQ ID NO:149 or a variant thereof; or
(6) (i) a VH1 having an amino acid sequence of SEQ ID NO:78 or a variant thereof; and (ii) a VL1 having an amino acid sequence of SEQ ID NO:150 or a variant thereof; or
(7) (i) a VH1 having an amino acid sequence of SEQ ID NO:79 or a variant thereof; and (ii) a VL1 having an amino acid sequence of SEQ ID NO:151 or a variant thereof; or
(8) (i) a VH1 having an amino acid sequence of SEQ ID NO:80 or a variant thereof; and (ii) a VL1 having an amino acid sequence of SEQ ID NO: 152 or a variant thereof; or
(9) (i) a VH1 having an amino acid sequence of SEQ ID NO:81 or a variant thereof; and (ii) a VL1 having an amino acid sequence of SEQ ID NO:153 or a variant thereof; or
(10) (i) a VH1 having an amino acid sequence of SEQ ID NO:82 or a variant thereof; and (ii) a VL1 having an amino acid sequence of SEQ ID NO:154 or a variant thereof; or
(11) (i) a VH1 having an amino acid sequence of SEQ ID NO:83 or a variant thereof; and (ii) a VL1 having an amino acid sequence of SEQ ID NO:155 or a variant thereof; or
(12) (i) a VH1 having an amino acid sequence of SEQ ID NO:84 or a variant thereof; and (ii) a VL1 having an amino acid sequence of SEQ ID NO:156 or a variant thereof; or
(13) (i) a VH1 having an amino acid sequence of SEQ ID NO:85 or a variant thereof; and (ii) a VL1 having an amino acid sequence of SEQ ID NO:157 or a variant thereof; or
(14) (i) a VH1 having an amino acid sequence of SEQ ID NO:86 or a variant thereof; and (ii) a VL1 having an amino acid sequence of SEQ ID NO:158 or a variant thereof; or
(15) (i) a VH1 having an amino acid sequence of SEQ ID NO:87 or a variant thereof; and (ii) a VL1 having an amino acid sequence of SEQ ID NO:159 or a variant thereof; or
(16) (i) a VH1 having an amino acid sequence of SEQ ID NO:88 or a variant thereof; and (ii) a VL1 having an amino acid sequence of SEQ ID NO: 160 or a variant thereof; or
(17) (i) a VH1 having an amino acid sequence of SEQ ID NO:89 or a variant thereof; and (ii) a VL1 having an amino acid sequence of SEQ ID NO: 161 or a variant thereof; or
(18) (i) a VH1 having an amino acid sequence of SEQ ID NO:90 or a variant thereof; and (ii) a VL1 having an amino acid sequence of SEQ ID NO:162 or a variant thereof; or
(19) (i) a VH1 having an amino acid sequence of SEQ ID NO:91 or a variant thereof; and (ii) a VL1 having an amino acid sequence of SEQ ID NO: 163 or a variant thereof; or
(20) (i) a VH1 having an amino acid sequence of SEQ ID NO:92 or a variant thereof; and (ii) a VL1 having an amino acid sequence of SEQ ID NO:164 or a variant thereof; or
(21) (i) a VH1 having an amino acid sequence of SEQ ID NO:93 or a variant thereof; and (ii) a VL1 having an amino acid sequence of SEQ ID NO:165 or a variant thereof.

4. The bispecific antibody according to any one of claims 1 to 3, wherein VH2 and VL2 are selected from the following:
(1) (i) a VH2 comprising a vhCDR1, a vhCDR2, and a vhCDR3 having an amino acid sequence of a vhCDR1, a vhCDR2, and a vhCDR3, respectively, of a VH having an amino acid sequence of SEQ ID NO:333; and (ii) a VL2 comprising a vlCDR1, a vlCDR2, and a vlCDR3 having an amino acid sequence of a vlCDR1, a vlCDR2, and a vlCDR3, respectively, of a VL having an amino acid sequence of SEQ ID NO:337; or
(2) (i) a VH2 comprising a vhCDR1, a vhCDR2, and a vhCDR3 having an amino acid sequence of a vhCDR1, a vhCDR2, and a vhCDR3, respectively, of a VH having an amino acid sequence of SEQ ID NO:344; and (ii) a VL2 comprising a vlCDR1, a vlCDR2, and a vlCDR3 having an amino acid sequence of a vlCDR1, a vlCDR2, and a vlCDR3, respectively, of a VL having an amino acid sequence of SEQ ID NO:348; or
(3) (i) a VH2 comprising a vhCDR1, a vhCDR2, and a vhCDR3 having an amino acid sequence of a vhCDR1, a vhCDR2, and a vhCDR3, respectively, of a VH having an amino acid sequence of SEQ ID NO:355; and (ii) a VL2 comprising a vlCDR1, a vlCDR2, and a vlCDR3 having an amino acid sequence of a vlCDR1, a vlCDR2, and a vlCDR3, respectively, of a VL having an amino acid sequence of SEQ ID NO:359; or
(4) (i) a VH2 comprising a vhCDR1, a vhCDR2, and a vhCDR3 having an amino acid sequence of a vhCDR1, a vhCDR2, and a vhCDR3, respectively, of a VH having an amino acid sequence of SEQ ID NO:366; and (ii) a VL2 comprising a vlCDR1, a vlCDR2, and a vlCDR3 having an amino acid sequence of a vlCDR1, a vlCDR2, and a vlCDR3, respectively, of a VL having an amino acid sequence of SEQ ID NO:370; or
(5) (i) a VH2 comprising a vhCDR1, a vhCDR2, and a vhCDR3 having an amino acid sequence of a vhCDR1, a vhCDR2, and a vhCDR3, respectively, of a VH having an amino acid sequence of SEQ ID NO:377; and (ii) a VL2 comprising a vlCDR1, a vlCDR2, and a vlCDR3 having an amino acid sequence of a vlCDR1, a vlCDR2, and a vlCDR3, respectively, of a VL having an amino acid sequence of SEQ ID NO:381; or
(6) (i) a VH2 comprising a vhCDR1, a vhCDR2, and a vhCDR3 having an amino acid sequence of a vhCDR1, a vhCDR2, and a vhCDR3, respectively, of a VH having an amino acid sequence of SEQ ID NO:388; and (ii) a VL2 comprising a vlCDR1, a vlCDR2, and a vlCDR3 having an amino acid sequence of a vlCDR1, a vlCDR2, and a vlCDR3, respectively, of a VL having an amino acid sequence of SEQ ID NO:392.

5. The bispecific antibody according to claim 4, wherein VH2 and VL2 are selected from the following:
(1) (i) a VH2 having an amino acid sequence of SEQ ID NO:333 or a variant thereof; and (ii) a VL2 having an amino acid sequence of SEQ ID NO:337 or a variant thereof; or
(2) (i) a VH2 having an amino acid sequence of SEQ ID NO:344 or a variant thereof; and (ii) a VL2 having an amino acid sequence of SEQ ID NO:348 or a variant thereof; or
(3) (i) a VH2 having an amino acid sequence of SEQ ID NO:355 or a variant thereof; and (ii) a VL2 having an amino acid sequence of SEQ ID NO:359 or a variant thereof; or
(4) (i) a VH2 having an amino acid sequence of SEQ ID NO:366 or a variant thereof; and (ii) a VL2 having an amino acid sequence of SEQ ID NO:370 or a variant thereof; or
(5) (i) a VH2 having an amino acid sequence of SEQ ID NO:377 or a variant thereof; and (ii) a VL2 having an amino acid sequence of SEQ ID NO:381 or a variant thereof; or
(6) (i) a VH2 having an amino acid sequence of SEQ ID NO:388 or a variant thereof; and (ii) a VL2 having an amino acid sequence of SEQ ID NO:392 or a variant thereof.

6. The bispecific antibody according to any one of claims 1 to 5, wherein bispecific antibody further comprises a first Fc domain and a second Fc domain.

7. The bispecific antibody according to claim 6, wherein the first and second Fc domains comprise a set of heterodimerization skew variants selected from the following heterodimerization variants: S364K/E357Q: L368D/K370S; S364K: L368D/K370S; S364K: L368E/K370S; D401K: T411E/K360E/Q362E; and T366W:T366S/L368A/Y407V, wherein numbering is according to EU numbering.

8. The bispecific antibody according to claim 7, wherein the first and second Fc domains comprise heterodimerization skew variants S364K/E357Q: L368D/K370S, wherein numbering is according to EU numbering.

9. The bispecific antibody according to any one of claims 6 to 8, wherein the first and second Fc domains each comprise one or more ablation variants.

10. The bispecific antibody according to claim 9, wherein the one or more ablation variants comprise E233P/L234V/L235A/G236del/S267K, wherein numbering is according to EU numbering.

11. The bispecific antibody according to any of claims 6 to 10, wherein one of the first or second monomer further comprises one or more pI variants.

12. The bispecific antibody according to claim 11, wherein the pI variants N208D/Q295E/N384D/Q418E/N421D, wherein numbering is according to EU numbering.

13. A heterodimeric antibody comprising:
a) a first monomer comprising:
i) a single chain variable fragment (scFv); and
ii) a first Fc domain, wherein the scFv is covalently attached to the N-terminus of the first Fc domain using a domain linker;
b) a second monomer comprising, from N-terminal to C-terminal, a VH1-CH1-hinge-CH2-CH3, wherein VH1 is a first variable heavy domain and CH2-CH3 is a second Fc domain; and
c) a light chain comprising, from N-terminal to C-terminal, VL1-CL, wherein VL1 is a first variable light domain and CL is a constant light domain,
wherein the scFv comprises a second VH domain (VH2), a scFv linker, and a second variable light domain (VL2),
wherein the VH1 and the VL1 together form a first antigen binding domain (ABD) and the VH2 and the VL2 together form a second ABD, and
wherein one of the first ABD and second ABD is a thymic stromal lymphopoietin receptor (TSLPR) binding domain and the other of the first ABD and second ABD is a CD3 epsilon (CD3e) binding domain.

14. The heterodimeric antibody according to claim 13, wherein the scFv comprises, from N-terminal to C-terminal, VH2-scFv linker-VL2.

15. The heterodimeric antibody according to claim 13, wherein the scFv comprises, from N-terminal to C-terminal, VL2-scFv linker-VH2.

16. The heterodimeric antibody according to any one of claims 13 to 15, wherein the first ABD is the TSLPR binding domain and the second ABD is the CD3e binding domain.

17. The heterodimeric antibody according to claim 16, wherein VH1 and VL1 are selected from one of the following:
(1) (i) a VH1 comprising a vhCDR1, a vhCDR2, and a vhCDR3 having an amino acid sequence of a vhCDR1, a vhCDR2, and a vhCDR3, respectively, of a VH having an amino acid sequence of SEQ ID NO:7 or a variant thereof; and (ii) a VL1 comprising a vlCDR1, a vlCDR2, and a vlCDR3 having an amino acid sequence of a vlCDR1, a vlCDR2, and a vlCDR3, respectively, of a VL having an amino acid sequence of SEQ ID NO: 10 or a variant thereof; or
(2) (i) a VH1 comprising a vhCDR1, a vhCDR2, and a vhCDR3 having an amino acid sequence of a vhCDR1, a vhCDR2, and a vhCDR3, respectively, of a VH having an amino acid sequence of SEQ ID NO:8 or a variant thereof; and (ii) a VL1 comprising a vlCDR1, a vlCDR2, and a vlCDR3 having an amino acid sequence of a vlCDR1, a vlCDR2, and a vlCDR3, respectively, of a VL having an amino acid sequence of SEQ ID NO: 11 or a variant thereof; or
(3) (i) a VH1 comprising a vhCDR1, a vhCDR2, and a vhCDR3 having an amino acid sequence of a vhCDR1, a vhCDR2, and a vhCDR3, respectively, of a VH having an amino acid sequence of SEQ ID NO:9 or a variant thereof; and (ii) a VL1 comprising a vlCDR1, a vlCDR2, and a vlCDR3 having an amino acid sequence of a vlCDR1, a vlCDR2, and a vlCDR3, respectively, of a VL having an amino acid sequence of SEQ ID NO: 12 or a variant thereof; or
(4) (i) a VH1 comprising a vhCDR1, a vhCDR2, and a vhCDR3 having an amino acid sequence of a vhCDR1, a vhCDR2, and a vhCDR3, respectively, of a VH having an amino acid sequence of SEQ ID NO:76 or a variant thereof; and (ii) a VL1 comprising a vlCDR1, a vlCDR2, and a vlCDR3 having an amino acid sequence of a vlCDR1, a vlCDR2, and a vlCDR3, respectively, of a VL having an amino acid sequence of SEQ ID NO: 148 or a variant thereof; or
(5) (i) a VH1 comprising a vhCDR1, a vhCDR2, and a vhCDR3 having an amino acid sequence of a vhCDR1, a vhCDR2, and a vhCDR3, respectively, of a VH having an amino acid sequence of SEQ ID NO:77 or a variant thereof; and (ii) a VL1 comprising a vlCDR1, a vlCDR2, and a vlCDR3 having an amino acid sequence of a vlCDR1, a vlCDR2, and a vlCDR3, respectively, of a VL having an amino acid sequence of SEQ ID NO: 149 or a variant thereof; or
(6) (i) a VH1 comprising a vhCDR1, a vhCDR2, and a vhCDR3 having an amino acid sequence of a vhCDR1, a vhCDR2, and a vhCDR3, respectively, of a VH having an amino acid sequence of SEQ ID NO:78 or a variant thereof; and (ii) a VL1 comprising a vlCDR1, a vlCDR2, and a vlCDR3 having an amino acid sequence of a vlCDR1, a vlCDR2, and a vlCDR3, respectively, of a VL having an amino acid sequence of SEQ ID NO: 150 or a variant thereof; or
(7) (i) a VH1 comprising a vhCDR1, a vhCDR2, and a vhCDR3 having an amino acid sequence of a vhCDR1, a vhCDR2, and a vhCDR3, respectively, of a VH having an amino acid sequence of SEQ ID NO:79 or a variant thereof; and (ii) a VL1 comprising a vlCDR1, a vlCDR2, and a vlCDR3 having an amino acid sequence of a vlCDR1, a vlCDR2, and a vlCDR3, respectively, of a VL having an amino acid sequence of SEQ ID NO: 151 or a variant thereof; or
(8) (i) a VH1 comprising a vhCDR1, a vhCDR2, and a vhCDR3 having an amino acid sequence of a vhCDR1, a vhCDR2, and a vhCDR3, respectively, of a VH having an amino acid sequence of SEQ ID NO:80 or a variant thereof; and (ii) a VL1 comprising a vlCDR1, a vlCDR2, and a vlCDR3 having an amino acid sequence of a vlCDR1, a vlCDR2, and a vlCDR3, respectively, of a VL having an amino acid sequence of SEQ ID NO:152 or a variant thereof; or
(9) (i) a VH1 comprising a vhCDR1, a vhCDR2, and a vhCDR3 having an amino acid sequence of a vhCDR1, a vhCDR2, and a vhCDR3, respectively, of a VH having an amino acid sequence of SEQ ID NO:81 or a variant thereof; and (ii) a VL1 comprising a vlCDR1, a vlCDR2, and a vlCDR3 having an amino acid sequence of a vlCDR1, a vlCDR2, and a vlCDR3, respectively, of a VL having an amino acid sequence of SEQ ID NO:153 or a variant thereof; or
(10) (i) a VH1 comprising a vhCDR1, a vhCDR2, and a vhCDR3 having an amino acid sequence of a vhCDR1, a vhCDR2, and a vhCDR3, respectively, of a VH having an amino acid sequence of SEQ ID NO:82 or a variant thereof; and (ii) a VL1 comprising a vlCDR1, a vlCDR2, and a vlCDR3 having an amino acid sequence of a vlCDR1, a vlCDR2, and a vlCDR3, respectively, of a VL having an amino acid sequence of SEQ ID NO: 154 or a variant thereof; or
(11) (i) a VH1 comprising a vhCDR1, a vhCDR2, and a vhCDR3 having an amino acid sequence of a vhCDR1, a vhCDR2, and a vhCDR3, respectively, of a VH having an amino acid sequence of SEQ ID NO:83 or a variant thereof; and (ii) a VL1 comprising a vlCDR1, a vlCDR2, and a vlCDR3 having an amino acid sequence of a vlCDR1, a vlCDR2, and a vlCDR3, respectively, of a VL having an amino acid sequence of SEQ ID NO:155 or a variant thereof; or
(12) (i) a VH1 comprising a vhCDR1, a vhCDR2, and a vhCDR3 having an amino acid sequence of a vhCDR1, a vhCDR2, and a vhCDR3, respectively, of a VH having an amino acid sequence of SEQ ID NO:84 or a variant thereof; and (ii) a VL1 comprising a vlCDR1, a vlCDR2, and a vlCDR3 having an amino acid sequence of a vlCDR1, a vlCDR2, and a vlCDR3, respectively, of a VL having an amino acid sequence of SEQ ID NO:156 or a variant thereof; or
(13) (i) a VH1 comprising a vhCDR1, a vhCDR2, and a vhCDR3 having an amino acid sequence of a vhCDR1, a vhCDR2, and a vhCDR3, respectively, of a VH having an amino acid sequence of SEQ ID NO:85 or a variant thereof; and (ii) a VL1 comprising a vlCDR1, a vlCDR2, and a vlCDR3 having an amino acid sequence of a vlCDR1, a vlCDR2, and a vlCDR3, respectively, of a VL having an amino acid sequence of SEQ ID NO: 157 or a variant thereof; or
(14) (i) a VH1 comprising a vhCDR1, a vhCDR2, and a vhCDR3 having an amino acid sequence of a vhCDR1, a vhCDR2, and a vhCDR3, respectively, of a VH having an amino acid sequence of SEQ ID NO:86 or a variant thereof; and (ii) a VL1 comprising a vlCDR1, a vlCDR2, and a vlCDR3 having an amino acid sequence of a vlCDR1, a vlCDR2, and a vlCDR3, respectively, of a VL having an amino acid sequence of SEQ ID NO:158 or a variant thereof; or
(15) (i) a VH1 comprising a vhCDR1, a vhCDR2, and a vhCDR3 having an amino acid sequence of a vhCDR1, a vhCDR2, and a vhCDR3, respectively, of a VH having an amino acid sequence of SEQ ID NO:87 or a variant thereof; and (ii) a VL1 comprising a vlCDR1, a vlCDR2, and a vlCDR3 having an amino acid sequence of a vlCDR1, a vlCDR2, and a vlCDR3, respectively, of a VL having an amino acid sequence of SEQ ID NO: 159 or a variant thereof; or
(16) (i) a VH1 comprising a vhCDR1, a vhCDR2, and a vhCDR3 having an amino acid sequence of a vhCDR1, a vhCDR2, and a vhCDR3, respectively, of a VH having an amino acid sequence of SEQ ID NO:88 or a variant thereof; and (ii) a VL1 comprising a vlCDR1, a vlCDR2, and a vlCDR3 having an amino acid sequence of a vlCDR1, a vlCDR2, and a vlCDR3, respectively, of a VL having an amino acid sequence of SEQ ID NO: 160 or a variant thereof; or
(17) (i) a VH1 comprising a vhCDR1, a vhCDR2, and a vhCDR3 having an amino acid sequence of a vhCDR1, a vhCDR2, and a vhCDR3, respectively, of a VH having an amino acid sequence of SEQ ID NO:89 or a variant thereof; and (ii) a VL1 comprising a vlCDR1, a vlCDR2, and a vlCDR3 having an amino acid sequence of a vlCDR1, a vlCDR2, and a vlCDR3, respectively, of a VL having an amino acid sequence of SEQ ID NO: 161 or a variant thereof; or
(18) (i) a VH1 comprising a vhCDR1, a vhCDR2, and a vhCDR3 having an amino acid sequence of a vhCDR1, a vhCDR2, and a vhCDR3, respectively, of a VH having an amino acid sequence of SEQ ID NO:90 or a variant thereof; and (ii) a VL1 comprising a vlCDR1, a vlCDR2, and a vlCDR3 having an amino acid sequence of a vlCDR1, a vlCDR2, and a vlCDR3, respectively, of a VL having an amino acid sequence of SEQ ID NO:162 or a variant thereof; or
(19) (i) a VH1 comprising a vhCDR1, a vhCDR2, and a vhCDR3 having an amino acid sequence of a vhCDR1, a vhCDR2, and a vhCDR3, respectively, of a VH having an amino acid sequence of SEQ ID NO:91 or a variant thereof; and (ii) a VL1 comprising a vlCDR1, a vlCDR2, and a vlCDR3 having an amino acid sequence of a vlCDR1, a vlCDR2, and a vlCDR3, respectively, of a VL having an amino acid sequence of SEQ ID NO:163 or a variant thereof; or
(20) (i) a VH1 comprising a vhCDR1, a vhCDR2, and a vhCDR3 having an amino acid sequence of a vhCDR1, a vhCDR2, and a vhCDR3, respectively, of a VH having an amino acid sequence of SEQ ID NO:92 or a variant thereof; and (ii) a VL1 comprising a vlCDR1, a vlCDR2, and a vlCDR3 having an amino acid sequence of a vlCDR1, a vlCDR2, and a vlCDR3, respectively, of a VL having an amino acid sequence of SEQ ID NO:164 or a variant thereof; or
(21) (i) a VH1 comprising a vhCDR1, a vhCDR2, and a vhCDR3 having an amino acid sequence of a vhCDR1, a vhCDR2, and a vhCDR3, respectively, of a VH having an amino acid sequence of SEQ ID NO:93 or a variant thereof; and (ii) a VL1 comprising a vlCDR1, a vlCDR2, and a vlCDR3 having an amino acid sequence of a vlCDR1, a vlCDR2, and a vlCDR3, respectively, of a VL having an amino acid sequence of SEQ ID NO: 165 or a variant thereof.

18. The heterodimeric antibody according to claim 17, wherein VH1 and VL1 are selected from the following:
(1) (i) a VH1 having an amino acid sequence of SEQ ID NO:7 or a variant thereof; and (ii) a VL1 having an amino acid sequence of SEQ ID NO:10 or a variant thereof; or
(2) (i) a VH1 having an amino acid sequence of SEQ ID NO:8 or a variant thereof; and (ii) a VL1 having an amino acid sequence of SEQ ID NO:11 or a variant thereof; or
(3) (i) a VH1 having an amino acid sequence of SEQ ID NO:9 or a variant thereof; and (ii) a VL1 having an amino acid sequence of SEQ ID NO:12 or a variant thereof; or
(4) (i) a VH1 having an amino acid sequence of SEQ ID NO:76 or a variant thereof; and (ii) a VL1 having an amino acid sequence of SEQ ID NO:148 or a variant thereof; or
(5) (i) a VH1 having an amino acid sequence of SEQ ID NO:77 or a variant thereof; and (ii) a VL1 having an amino acid sequence of SEQ ID NO:149 or a variant thereof; or
(6) (i) a VH1 having an amino acid sequence of SEQ ID NO:78 or a variant thereof; and (ii) a VL1 having an amino acid sequence of SEQ ID NO: 150 or a variant thereof; or
(7) (i) a VH1 having an amino acid sequence of SEQ ID NO:79 or a variant thereof; and (ii) a VL1 having an amino acid sequence of SEQ ID NO:151 or a variant thereof; or
(8) (i) a VH1 having an amino acid sequence of SEQ ID NO:80 or a variant thereof; and (ii) a VL1 having an amino acid sequence of SEQ ID NO:152 or a variant thereof; or
(9) (i) a VH1 having an amino acid sequence of SEQ ID NO:81 or a variant thereof; and (ii) a VL1 having an amino acid sequence of SEQ ID NO:153 or a variant thereof; or
(10) (i) a VH1 having an amino acid sequence of SEQ ID NO:82 or a variant thereof; and (ii) a VL1 having an amino acid sequence of SEQ ID NO:154 or a variant thereof; or
(11) (i) a VH1 having an amino acid sequence of SEQ ID NO:83 or a variant thereof; and (ii) a VL1 having an amino acid sequence of SEQ ID NO:155 or a variant thereof; or
(12) (i) a VH1 having an amino acid sequence of SEQ ID NO:84 or a variant thereof; and (ii) a VL1 having an amino acid sequence of SEQ ID NO: 156 or a variant thereof; or
(13) (i) a VH1 having an amino acid sequence of SEQ ID NO:85 or a variant thereof; and (ii) a VL1 having an amino acid sequence of SEQ ID NO:157 or a variant thereof; or
(14) (i) a VH1 having an amino acid sequence of SEQ ID NO:86 or a variant thereof; and (ii) a VL1 having an amino acid sequence of SEQ ID NO:158 or a variant thereof; or
(15) (i) a VH1 having an amino acid sequence of SEQ ID NO:87 or a variant thereof; and (ii) a VL1 having an amino acid sequence of SEQ ID NO:159 or a variant thereof; or
(16) (i) a VH1 having an amino acid sequence of SEQ ID NO:88 or a variant thereof; and (ii) a VL1 having an amino acid sequence of SEQ ID NO:160 or a variant thereof; or
(17) (i) a VH1 having an amino acid sequence of SEQ ID NO:89 or a variant thereof; and (ii) a VL1 having an amino acid sequence of SEQ ID NO:161 or a variant thereof; or
(18) (i) a VH1 having an amino acid sequence of SEQ ID NO:90 or a variant thereof; and (ii) a VL1 having an amino acid sequence of SEQ ID NO: 162 or a variant thereof; or
(19) (i) a VH1 having an amino acid sequence of SEQ ID NO:91 or a variant thereof; and (ii) a VL1 having an amino acid sequence of SEQ ID NO:163 or a variant thereof; or
(20) (i) a VH1 having an amino acid sequence of SEQ ID NO:92 or a variant thereof; and (ii) a VL1 having an amino acid sequence of SEQ ID NO:164 or a variant thereof; or
(21) (i) a VH1 having an amino acid sequence of SEQ ID NO:93 or a variant thereof; and (ii) a VL1 having an amino acid sequence of SEQ ID NO:165 or a variant thereof.

19. The heterodimeric antibody according to any one of claims 16 to 18, wherein VH2 and VL2 are selected from one of the following:
(1) (i) a VH2 comprising a vhCDR1, a vhCDR2, and a vhCDR3 having an amino acid sequence of a vhCDR1, a vhCDR2, and a vhCDR3, respectively, of a VH having an amino acid sequence of SEQ ID NO:333; and (ii) a VL2 comprising a vlCDR1, a vlCDR2, and a vlCDR3 having an amino acid sequence of a vlCDR1, a vlCDR2, and a vlCDR3, respectively, of a VL having an amino acid sequence of SEQ ID NO:337; or
(2) (i) a VH2 comprising a vhCDR1, a vhCDR2, and a vhCDR3 having an amino acid sequence of a vhCDR1, a vhCDR2, and a vhCDR3, respectively, of a VH having an amino acid sequence of SEQ ID NO:344; and (ii) a VL2 comprising a vlCDR1, a vlCDR2, and a vlCDR3 having an amino acid sequence of a vlCDR1, a vlCDR2, and a vlCDR3, respectively, of a VL having an amino acid sequence of SEQ ID NO:348; or
(3) (i) a VH2 comprising a vhCDR1, a vhCDR2, and a vhCDR3 having an amino acid sequence of a vhCDR1, a vhCDR2, and a vhCDR3, respectively, of a VH having an amino acid sequence of SEQ ID NO:355; and (ii) a VL2 comprising a vlCDR1, a vlCDR2, and a vlCDR3 having an amino acid sequence of a vlCDR1, a vlCDR2, and a vlCDR3, respectively, of a VL having an amino acid sequence of SEQ ID NO:359; or
(4) (i) a VH2 comprising a vhCDR1, a vhCDR2, and a vhCDR3 having an amino acid sequence of a vhCDR1, a vhCDR2, and a vhCDR3, respectively, of a VH having an amino acid sequence of SEQ ID NO:366; and (ii) a VL2 comprising a vlCDR1, a vlCDR2, and a vlCDR3 having an amino acid sequence of a vlCDR1, a vlCDR2, and a vlCDR3, respectively, of a VL having an amino acid sequence of SEQ ID NO:370; or
(5) (i) a VH2 comprising a vhCDR1, a vhCDR2, and a vhCDR3 having an amino acid sequence of a vhCDR1, a vhCDR2, and a vhCDR3, respectively, of a VH having an amino acid sequence of SEQ ID NO:377; and (ii) a VL2 comprising a vlCDR1, a vlCDR2, and a vlCDR3 having an amino acid sequence of a vlCDR1, a vlCDR2, and a vlCDR3, respectively, of a VL having an amino acid sequence of SEQ ID NO:381; or
(6) (i) a VH2 comprising a vhCDR1, a vhCDR2, and a vhCDR3 having an amino acid sequence of a vhCDR1, a vhCDR2, and a vhCDR3, respectively, of a VH having an amino acid sequence of SEQ ID NO:388; and (ii) a VL2 comprising a vlCDR1, a vlCDR2, and a vlCDR3 having an amino acid sequence of a vlCDR1, a vlCDR2, and a vlCDR3, respectively, of a VL having an amino acid sequence of SEQ ID NO:392.

20. The heterodimeric antibody according to claim 19, where VH2 and VL2 are selected from one of the following:
(1) (i) a VH2 having an amino acid sequence of SEQ ID NO:333 or a variant thereof; and (ii) a VL2 having an amino acid sequence of SEQ ID NO:337 or a variant thereof; or
(2) (i) a VH2 having an amino acid sequence of SEQ ID NO:344 or a variant thereof; and (ii) a VL2 having an amino acid sequence of SEQ ID NO:348 or a variant thereof; or
(3) (i) a VH2 having an amino acid sequence of SEQ ID NO:355 or a variant thereof; and (ii) a VL2 having an amino acid sequence of SEQ ID NO:359 or a variant thereof; or
(4) (i) a VH2 having an amino acid sequence of SEQ ID NO:366 or a variant thereof; and (ii) a VL2 having an amino acid sequence of SEQ ID NO:370 or a variant thereof; or
(5) (i) a VH2 having an amino acid sequence of SEQ ID NO:377 or a variant thereof; and (ii) a VL2 having an amino acid sequence of SEQ ID NO:381 or a variant thereof; or
(6) (i) a VH2 having an amino acid sequence of SEQ ID NO:388 or a variant thereof; and (ii) a VL2 having an amino acid sequence of SEQ ID NO:392 or a variant thereof.

21. The heterodimeric antibody according to any one of claims 13 to 20, wherein the first Fc domain and second Fc domain are each variant Fc domains.

22. The heterodimeric antibody according to claim 21, wherein the first and second Fc domains comprise a set of heterodimerization skew variants selected from the following heterodimerization variants: S364K/E357Q: L368D/K370S; S364K: L368D/K370S; S364K: L368E/K370S; D401K: T411E/K360E/Q362E; and T366W:T366S/L368A/Y407V, wherein numbering is according to EU numbering.

23. The heterodimeric antibody according to claim 22, wherein the first and second Fc domains comprise heterodimerization skew variants S364K/E357Q: L368D/K370S, wherein numbering is according to EU numbering.

24. The heterodimeric antibody according to any one of claims 21 to 23, wherein the first and second Fc domains each comprise one or more ablation variants.

25. The heterodimeric antibody according to claim 24, wherein the one or more ablation variants comprise E233P/L234V/L235A/G236del/S267K, wherein numbering is according to EU numbering.

26. The heterodimeric antibody according to any of claims 21 to 25, wherein one of the first or second monomer further comprises one or more pI variants.

27. The heterodimeric antibody according to claim 26, wherein the CH1-hinge-CH2-CH3 of the second monomer comprises pI variants N208D/Q295E/N384D/Q418E/N421D, wherein numbering is according to EU numbering.

28. The heterodimeric antibody according to any of claims 21 to 27, wherein the CH1-hinge-CH2-CH3 of the second monomer comprises amino acid variants E233P/L234V/L235A/G236del/S267K/L368D/K370S/N208D/Q295E/N384D/Q418E/N421D,
wherein the first Fc domain comprises amino acid variants E233P/L234V/L235A/G236del/S267K/S364K/E357Q,
and wherein numbering is according to EU numbering.

29. The heterodimeric antibody according to any one of claims 22 to 28, wherein the first and second variant Fc domains each further comprise amino acid variants 428L/434S.

30. The heterodimeric antibody according to any one of claims 13 to 29, wherein the scFv linker is GKPGSGKPGSGKPGSGKPGS.

31. A heterodimeric antibody comprising:
a) a first monomer comprising, from N-terminal to C-terminal, VH1-CH1-first domain linker-scFv-second domain linker-CH2-CH3,
wherein VH1 is a first variable heavy domain, and CH2-CH3 is a first Fc domain;
b) a second monomer comprising, from N-terminal to C-terminal, a VH1-CH1-hinge-CH2-CH3, wherein CH2-CH3 is a second Fc domain; and
c) a light chain comprising, from N-terminal to C-terminal, VL1-CL, wherein VL1 is a first variable light domain and CL is a constant light domain,
wherein the scFv comprises a second VH domain (VH2), a scFv linker, and a second variable light domain (VL2),
wherein each of the VH1s and the VL1 together form a first antigen binding domain (ABD), and the VH2 and the VL2 form a second ABD, and
wherein one of the first ABDs and second ABD is a thymic stromal lymphopoietin receptor (TSLPR) binding domain and the other of the first ABDs and second ABD is a CD3 epsilon (CD3e) binding domain.

32. The heterodimeric antibody according to claim 31, wherein the scFv comprises, from N-terminal to C-terminal, VH2-scFv linker-VL2.

33. The heterodimeric antibody according to claim 31, wherein the scFv comprises, from N-terminal to C-terminal, VL2-scFv linker-VH2.

34. The heterodimeric antibody according to any one of claims 31 to 33, wherein the first ABDs are the TSLPR binding domains and the second ABD is the CD3e binding domain.

35. The heterodimeric antibody according to claim 34, wherein VH1s and VL1s are selected from one of the following:
(1) (i) a VH1 comprising a vhCDR1, a vhCDR2, and a vhCDR3 having an amino acid sequence of a vhCDR1, a vhCDR2, and a vhCDR3, respectively, of a VH having an amino acid sequence of SEQ ID NO:7 or a variant thereof; and (ii) a VL1 comprising a vlCDR1, a vlCDR2, and a vlCDR3 having an amino acid sequence of a vlCDR1, a vlCDR2, and a vlCDR3, respectively, of a VL having an amino acid sequence of SEQ ID NO: 10 or a variant thereof; or
(2) (i) a VH1 comprising a vhCDR1, a vhCDR2, and a vhCDR3 having an amino acid sequence of a vhCDR1, a vhCDR2, and a vhCDR3, respectively, of a VH having an amino acid sequence of SEQ ID NO:8 or a variant thereof; and (ii) a VL1 comprising a vlCDR1, a vlCDR2, and a vlCDR3 having an amino acid sequence of a vlCDR1, a vlCDR2, and a vlCDR3, respectively, of a VL having an amino acid sequence of SEQ ID NO:11 or a variant thereof; or
(3) (i) a VH1 comprising a vhCDR1, a vhCDR2, and a vhCDR3 having an amino acid sequence of a vhCDR1, a vhCDR2, and a vhCDR3, respectively, of a VH having an amino acid sequence of SEQ ID NO:9 or a variant thereof; and (ii) a VL1 comprising a vlCDR1, a vlCDR2, and a vlCDR3 having an amino acid sequence of a vlCDR1, a vlCDR2, and a vlCDR3, respectively, of a VL having an amino acid sequence of SEQ ID NO: 12 or a variant thereof; or
(4) (i) a VH1 comprising a vhCDR1, a vhCDR2, and a vhCDR3 having an amino acid sequence of a vhCDR1, a vhCDR2, and a vhCDR3, respectively, of a VH having an amino acid sequence of SEQ ID NO:76 or a variant thereof; and (ii) a VL1 comprising a vlCDR1, a vlCDR2, and a vlCDR3 having an amino acid sequence of a vlCDR1, a vlCDR2, and a vlCDR3, respectively, of a VL having an amino acid sequence of SEQ ID NO: 148 or a variant thereof; or
(5) (i) a VH1 comprising a vhCDR1, a vhCDR2, and a vhCDR3 having an amino acid sequence of a vhCDR1, a vhCDR2, and a vhCDR3, respectively, of a VH having an amino acid sequence of SEQ ID NO:77 or a variant thereof; and (ii) a VL1 comprising a vlCDR1, a vlCDR2, and a vlCDR3 having an amino acid sequence of a vlCDR1, a vlCDR2, and a vlCDR3, respectively, of a VL having an amino acid sequence of SEQ ID NO: 149 or a variant thereof; or
(6) (i) a VH1 comprising a vhCDR1, a vhCDR2, and a vhCDR3 having an amino acid sequence of a vhCDR1, a vhCDR2, and a vhCDR3, respectively, of a VH having an amino acid sequence of SEQ ID NO:78 or a variant thereof; and (ii) a VL1 comprising a vlCDR1, a vlCDR2, and a vlCDR3 having an amino acid sequence of a vlCDR1, a vlCDR2, and a vlCDR3, respectively, of a VL having an amino acid sequence of SEQ ID NO: 150 or a variant thereof; or
(7) (i) a VH1 comprising a vhCDR1, a vhCDR2, and a vhCDR3 having an amino acid sequence of a vhCDR1, a vhCDR2, and a vhCDR3, respectively, of a VH having an amino acid sequence of SEQ ID NO:79 or a variant thereof; and (ii) a VL1 comprising a vlCDR1, a vlCDR2, and a vlCDR3 having an amino acid sequence of a vlCDR1, a vlCDR2, and a vlCDR3, respectively, of a VL having an amino acid sequence of SEQ ID NO:151 or a variant thereof; or
(8) (i) a VH1 comprising a vhCDR1, a vhCDR2, and a vhCDR3 having an amino acid sequence of a vhCDR1, a vhCDR2, and a vhCDR3, respectively, of a VH having an amino acid sequence of SEQ ID NO:80 or a variant thereof; and (ii) a VL1 comprising a vlCDR1, a vlCDR2, and a vlCDR3 having an amino acid sequence of a vlCDR1, a vlCDR2, and a vlCDR3, respectively, of a VL having an amino acid sequence of SEQ ID NO:152 or a variant thereof; or
(9) (i) a VH1 comprising a vhCDR1, a vhCDR2, and a vhCDR3 having an amino acid sequence of a vhCDR1, a vhCDR2, and a vhCDR3, respectively, of a VH having an amino acid sequence of SEQ ID NO:81 or a variant thereof; and (ii) a VL1 comprising a vlCDR1, a vlCDR2, and a vlCDR3 having an amino acid sequence of a vlCDR1, a vlCDR2, and a vlCDR3, respectively, of a VL having an amino acid sequence of SEQ ID NO: 153 or a variant thereof; or
(10) (i) a VH1 comprising a vhCDR1, a vhCDR2, and a vhCDR3 having an amino acid sequence of a vhCDR1, a vhCDR2, and a vhCDR3, respectively, of a VH having an amino acid sequence of SEQ ID NO:82 or a variant thereof; and (ii) a VL1 comprising a vlCDR1, a vlCDR2, and a vlCDR3 having an amino acid sequence of a vlCDR1, a vlCDR2, and a vlCDR3, respectively, of a VL having an amino acid sequence of SEQ ID NO: 154 or a variant thereof; or
(11) (i) a VH1 comprising a vhCDR1, a vhCDR2, and a vhCDR3 having an amino acid sequence of a vhCDR1, a vhCDR2, and a vhCDR3, respectively, of a VH having an amino acid sequence of SEQ ID NO:83 or a variant thereof; and (ii) a VL1 comprising a vlCDR1, a vlCDR2, and a vlCDR3 having an amino acid sequence of a vlCDR1, a vlCDR2, and a vlCDR3, respectively, of a VL having an amino acid sequence of SEQ ID NO:155 or a variant thereof; or
(12) (i) a VH1 comprising a vhCDR1, a vhCDR2, and a vhCDR3 having an amino acid sequence of a vhCDR1, a vhCDR2, and a vhCDR3, respectively, of a VH having an amino acid sequence of SEQ ID NO:84 or a variant thereof; and (ii) a VL1 comprising a vlCDR1, a vlCDR2, and a vlCDR3 having an amino acid sequence of a vlCDR1, a vlCDR2, and a vlCDR3, respectively, of a VL having an amino acid sequence of SEQ ID NO: 156 or a variant thereof; or
(13) (i) a VH1 comprising a vhCDR1, a vhCDR2, and a vhCDR3 having an amino acid sequence of a vhCDR1, a vhCDR2, and a vhCDR3, respectively, of a VH having an amino acid sequence of SEQ ID NO:85 or a variant thereof; and (ii) a VL1 comprising a vlCDR1, a vlCDR2, and a vlCDR3 having an amino acid sequence of a vlCDR1, a vlCDR2, and a vlCDR3, respectively, of a VL having an amino acid sequence of SEQ ID NO: 157 or a variant thereof; or
(14) (i) a VH1 comprising a vhCDR1, a vhCDR2, and a vhCDR3 having an amino acid sequence of a vhCDR1, a vhCDR2, and a vhCDR3, respectively, of a VH having an amino acid sequence of SEQ ID NO:86 or a variant thereof; and (ii) a VL1 comprising a vlCDR1, a vlCDR2, and a vlCDR3 having an amino acid sequence of a vlCDR1, a vlCDR2, and a vlCDR3, respectively, of a VL having an amino acid sequence of SEQ ID NO:158 or a variant thereof; or
(15) (i) a VH1 comprising a vhCDR1, a vhCDR2, and a vhCDR3 having an amino acid sequence of a vhCDR1, a vhCDR2, and a vhCDR3, respectively, of a VH having an amino acid sequence of SEQ ID NO:87 or a variant thereof; and (ii) a VL1 comprising a vlCDR1, a vlCDR2, and a vlCDR3 having an amino acid sequence of a vlCDR1, a vlCDR2, and a vlCDR3, respectively, of a VL having an amino acid sequence of SEQ ID NO: 159 or a variant thereof; or
(16) (i) a VH1 comprising a vhCDR1, a vhCDR2, and a vhCDR3 having an amino acid sequence of a vhCDR1, a vhCDR2, and a vhCDR3, respectively, of a VH having an amino acid sequence of SEQ ID NO:88 or a variant thereof; and (ii) a VL1 comprising a vlCDR1, a vlCDR2, and a vlCDR3 having an amino acid sequence of a vlCDR1, a vlCDR2, and a vlCDR3, respectively, of a VL having an amino acid sequence of SEQ ID NO:160 or a variant thereof; or
(17) (i) a VH1 comprising a vhCDR1, a vhCDR2, and a vhCDR3 having an amino acid sequence of a vhCDR1, a vhCDR2, and a vhCDR3, respectively, of a VH having an amino acid sequence of SEQ ID NO:89 or a variant thereof; and (ii) a VL1 comprising a vlCDR1, a vlCDR2, and a vlCDR3 having an amino acid sequence of a vlCDR1, a vlCDR2, and a vlCDR3, respectively, of a VL having an amino acid sequence of SEQ ID NO: 161 or a variant thereof; or
(18) (i) a VH1 comprising a vhCDR1, a vhCDR2, and a vhCDR3 having an amino acid sequence of a vhCDR1, a vhCDR2, and a vhCDR3, respectively, of a VH having an amino acid sequence of SEQ ID NO:90 or a variant thereof; and (ii) a VL1 comprising a vlCDR1, a vlCDR2, and a vlCDR3 having an amino acid sequence of a vlCDR1, a vlCDR2, and a vlCDR3, respectively, of a VL having an amino acid sequence of SEQ ID NO:162 or a variant thereof; or
(19) (i) a VH1 comprising a vhCDR1, a vhCDR2, and a vhCDR3 having an amino acid sequence of a vhCDR1, a vhCDR2, and a vhCDR3, respectively, of a VH having an amino acid sequence of SEQ ID NO:91 or a variant thereof; and (ii) a VL1 comprising a vlCDR1, a vlCDR2, and a vlCDR3 having an amino acid sequence of a vlCDR1, a vlCDR2, and a vlCDR3, respectively, of a VL having an amino acid sequence of SEQ ID NO: 163 or a variant thereof; or
(20) (i) a VH1 comprising a vhCDR1, a vhCDR2, and a vhCDR3 having an amino acid sequence of a vhCDR1, a vhCDR2, and a vhCDR3, respectively, of a VH having an amino acid sequence of SEQ ID NO:92 or a variant thereof; and (ii) a VL1 comprising a vlCDR1, a vlCDR2, and a vlCDR3 having an amino acid sequence of a vlCDR1, a vlCDR2, and a vlCDR3, respectively, of a VL having an amino acid sequence of SEQ ID NO:164 or a variant thereof; or
(21) (i) a VH1 comprising a vhCDR1, a vhCDR2, and a vhCDR3 having an amino acid sequence of a vhCDR1, a vhCDR2, and a vhCDR3, respectively, of a VH having an amino acid sequence of SEQ ID NO:93 or a variant thereof; and (ii) a VL1 comprising a vlCDR1, a vlCDR2, and a vlCDR3 having an amino acid sequence of a vlCDR1, a vlCDR2, and a vlCDR3, respectively, of a VL having an amino acid sequence of SEQ ID NO: 165 or a variant thereof.

36. The heterodimeric antibody according to claim 35, wherein VH1s and VL1s are selected from the following:
(1) (i) a VH1 having an amino acid sequence of SEQ ID NO:7 or a variant thereof; and (ii) a VL1 having an amino acid sequence of SEQ ID NO:10 or a variant thereof; or
(2) (i) a VH1 having an amino acid sequence of SEQ ID NO:8 or a variant thereof; and (ii) a VL1 having an amino acid sequence of SEQ ID NO:11 or a variant thereof; or
(3) (i) a VH1 having an amino acid sequence of SEQ ID NO:9 or a variant thereof; and (ii) a VL1 having an amino acid sequence of SEQ ID NO: 12 or a variant thereof; or
(4) (i) a VH1 having an amino acid sequence of SEQ ID NO:76 or a variant thereof; and (ii) a VL1 having an amino acid sequence of SEQ ID NO:148 or a variant thereof; or
(5) (i) a VH1 having an amino acid sequence of SEQ ID NO:77 or a variant thereof; and (ii) a VL1 having an amino acid sequence of SEQ ID NO:149 or a variant thereof; or
(6) (i) a VH1 having an amino acid sequence of SEQ ID NO:78 or a variant thereof; and (ii) a VL1 having an amino acid sequence of SEQ ID NO:150 or a variant thereof; or
(7) (i) a VH1 having an amino acid sequence of SEQ ID NO:79 or a variant thereof; and (ii) a VL1 having an amino acid sequence of SEQ ID NO:151 or a variant thereof; or
(8) (i) a VH1 having an amino acid sequence of SEQ ID NO:80 or a variant thereof; and (ii) a VL1 having an amino acid sequence of SEQ ID NO:152 or a variant thereof; or
(9) (i) a VH1 having an amino acid sequence of SEQ ID NO:81 or a variant thereof; and (ii) a VL1 having an amino acid sequence of SEQ ID NO: 153 or a variant thereof; or
(10) (i) a VH1 having an amino acid sequence of SEQ ID NO:82 or a variant thereof; and (ii) a VL1 having an amino acid sequence of SEQ ID NO:154 or a variant thereof; or
(11) (i) a VH1 having an amino acid sequence of SEQ ID NO:83 or a variant thereof; and (ii) a VL1 having an amino acid sequence of SEQ ID NO:155 or a variant thereof; or
(12) (i) a VH1 having an amino acid sequence of SEQ ID NO:84 or a variant thereof; and (ii) a VL1 having an amino acid sequence of SEQ ID NO:156 or a variant thereof; or
(13) (i) a VH1 having an amino acid sequence of SEQ ID NO:85 or a variant thereof; and (ii) a VL1 having an amino acid sequence of SEQ ID NO: 157 or a variant thereof; or
(14) (i) a VH1 having an amino acid sequence of SEQ ID NO:86 or a variant thereof; and (ii) a VL1 having an amino acid sequence of SEQ ID NO:158 or a variant thereof; or
(15) (i) a VH1 having an amino acid sequence of SEQ ID NO:87 or a variant thereof; and (ii) a VL1 having an amino acid sequence of SEQ ID NO: 159 or a variant thereof; or
(16) (i) a VH1 having an amino acid sequence of SEQ ID NO:88 or a variant thereof; and (ii) a VL1 having an amino acid sequence of SEQ ID NO:160 or a variant thereof; or
(17) (i) a VH1 having an amino acid sequence of SEQ ID NO:89 or a variant thereof; and (ii) a VL1 having an amino acid sequence of SEQ ID NO: 161 or a variant thereof; or
(18) (i) a VH1 having an amino acid sequence of SEQ ID NO:90 or a variant thereof; and (ii) a VL1 having an amino acid sequence of SEQ ID NO:162 or a variant thereof; or
(19) (i) a VH1 having an amino acid sequence of SEQ ID NO:91 or a variant thereof; and (ii) a VL1 having an amino acid sequence of SEQ ID NO: 163 or a variant thereof; or
(20) (i) a VH1 having an amino acid sequence of SEQ ID NO:92 or a variant thereof; and (ii) a VL1 having an amino acid sequence of SEQ ID NO:164 or a variant thereof; or
(21) (i) a VH1 having an amino acid sequence of SEQ ID NO:93 or a variant thereof; and (ii) a VL1 having an amino acid sequence of SEQ ID NO:165 or a variant thereof.

37. The heterodimeric antibody according to any one of claims 34 to 36, wherein VH2 and VL2 are selected from one of the following:
(1) (i) a VH2 comprising a vhCDR1, a vhCDR2, and a vhCDR3 having an amino acid sequence of a vhCDR1, a vhCDR2, and a vhCDR3, respectively, of a VH having an amino acid sequence of SEQ ID NO:333; and (ii) a VL2 comprising a vlCDR1, a vlCDR2, and a vlCDR3 having an amino acid sequence of a vlCDR1, a vlCDR2, and a vlCDR3, respectively, of a VL having an amino acid sequence of SEQ ID NO:337; or
(2) (i) a VH2 comprising a vhCDR1, a vhCDR2, and a vhCDR3 having an amino acid sequence of a vhCDR1, a vhCDR2, and a vhCDR3, respectively, of a VH having an amino acid sequence of SEQ ID NO:344; and (ii) a VL2 comprising a vlCDR1, a vlCDR2, and a vlCDR3 having an amino acid sequence of a vlCDR1, a vlCDR2, and a vlCDR3, respectively, of a VL having an amino acid sequence of SEQ ID NO:348; or
(3) (i) a VH2 comprising a vhCDR1, a vhCDR2, and a vhCDR3 having an amino acid sequence of a vhCDR1, a vhCDR2, and a vhCDR3, respectively, of a VH having an amino acid sequence of SEQ ID NO:355; and (ii) a VL2 comprising a vlCDR1, a vlCDR2, and a vlCDR3 having an amino acid sequence of a vlCDR1, a vlCDR2, and a vlCDR3, respectively, of a VL having an amino acid sequence of SEQ ID NO:359; or
(4) (i) a VH2 comprising a vhCDR1, a vhCDR2, and a vhCDR3 having an amino acid sequence of a vhCDR1, a vhCDR2, and a vhCDR3, respectively, of a VH having an amino acid sequence of SEQ ID NO:366; and (ii) a VL2 comprising a vlCDR1, a vlCDR2, and a vlCDR3 having an amino acid sequence of a vlCDR1, a vlCDR2, and a vlCDR3, respectively, of a VL having an amino acid sequence of SEQ ID NO:370; or
(5) (i) a VH2 comprising a vhCDR1, a vhCDR2, and a vhCDR3 having an amino acid sequence of a vhCDR1, a vhCDR2, and a vhCDR3, respectively, of a VH having an amino acid sequence of SEQ ID NO:377; and (ii) a VL2 comprising a vlCDR1, a vlCDR2, and a vlCDR3 having an amino acid sequence of a vlCDR1, a vlCDR2, and a vlCDR3, respectively, of a VL having an amino acid sequence of SEQ ID NO:381; or
(6) (i) a VH2 comprising a vhCDR1, a vhCDR2, and a vhCDR3 having an amino acid sequence of a vhCDR1, a vhCDR2, and a vhCDR3, respectively, of a VH having an amino acid sequence of SEQ ID NO:388; and (ii) a VL2 comprising a vlCDR1, a vlCDR2, and a vlCDR3 having an amino acid sequence of a vlCDR1, a vlCDR2, and a vlCDR3, respectively, of a VL having an amino acid sequence of SEQ ID NO:392.

38. The heterodimeric antibody according to claim 37, where VH2 and VL2 are selected from one of the following:
(1) (i) a VH2 having an amino acid sequence of SEQ ID NO:333 or a variant thereof; and (ii) a VL2 having an amino acid sequence of SEQ ID NO:337 or a variant thereof; or
(2) (i) a VH2 having an amino acid sequence of SEQ ID NO:344 or a variant thereof; and (ii) a VL2 having an amino acid sequence of SEQ ID NO:348 or a variant thereof; or
(3) (i) a VH2 having an amino acid sequence of SEQ ID NO:355 or a variant thereof; and (ii) a VL2 having an amino acid sequence of SEQ ID NO:359 or a variant thereof; or
(4) (i) a VH2 having an amino acid sequence of SEQ ID NO:366 or a variant thereof; and (ii) a VL2 having an amino acid sequence of SEQ ID NO:370 or a variant thereof; or
(5) (i) a VH2 having an amino acid sequence of SEQ ID NO:377 or a variant thereof; and (ii) a VL2 having an amino acid sequence of SEQ ID NO:381 or a variant thereof; or
(6) (i) a VH2 having an amino acid sequence of SEQ ID NO:388 or a variant thereof; and (ii) a VL2 having an amino acid sequence of SEQ ID NO:392 or a variant thereof.

39. The heterodimeric antibody according to any one of claims 31 to 38, wherein the first Fc domain and second Fc domain are each variant Fc domains.

40. The heterodimeric antibody according to claim 39, wherein the first and second Fc domains comprise a set of heterodimerization skew variants selected from the following heterodimerization variants: S364K/E357Q: L368D/K370S; S364K: L368D/K370S; S364K: L368E/K370S; D401K: T411E/K360E/Q362E; and T366W:T366S/L368A/Y407V, wherein numbering is according to EU numbering.

41. The heterodimeric antibody according to claim 40, wherein the first and second Fc domains comprise heterodimerization skew variants S364K/E357Q: L368D/K370S, wherein numbering is according to EU numbering.

42. The heterodimeric antibody according to any one of claims 39 to 41, wherein the first and second Fc domains each comprise one or more ablation variants.

43. The heterodimeric antibody according to claim 42, wherein the one or more ablation variants comprise E233P/L234V/L235A/G236del/S267K, wherein numbering is according to EU numbering.

44. The heterodimeric antibody according to any of claims 39 to 43, wherein one of the first or second monomer further comprises one or more pI variants.

45. The heterodimeric antibody according to claim 44, wherein the CH1-hinge-CH2-CH3 of the second monomer comprises pI variants N208D/Q295E/N384D/Q418E/N421D, wherein numbering is according to EU numbering.

46. The heterodimeric antibody according to any of claims 39 to 45, wherein the CH1-hinge-CH2-CH3 of the second monomer comprises amino acid variants E233P/L234V/L235A/G236del/S267K/L368D/K370S/N208D/Q295E/N384D/Q418E/N421 D,
wherein the first Fc domain comprises amino acid variants E233P/L234V/L235A/G236del/S267K/S364K/E357Q,
and wherein numbering is according to EU numbering.

47. The heterodimeric antibody according to any one of claims 40-46, wherein the first and second variant Fc domains each further comprise amino acid variants 428L/434S.

48. The heterodimeric antibody according to any one of claims 31 to 47, wherein the scFv linker is GKPGSGKPGSGKPGSGKPGS.

49. A nucleic acid composition comprising:
a) a first nucleic acid encoding the first variable heavy domain according to any one of claims 1-12;
b) a second nucleic acid encoding the first variable light domain according to any one of claims 1-12;
c) a third nucleic acid encoding the second variable heavy domain according to any one of claims 1-12; and
d) a fourth nucleic acid encoding the second variable heavy domain according to any one of claims 1-12;

50. A host cell comprising the nucleic acid composition of claim 49.

51. A method of making the bispecific antibody according to any of claims 1-12 comprising culturing the host cell of claim 50 under conditions wherein the bispecific antibody is expressed and recovering the heterodimeric antibody.

52. A nucleic acid composition comprising:
a) a first nucleic acid encoding the first monomer according to any of claims 13-48;
b) a second nucleic acid encoding the second monomer according to any of claims 13-48; and
c) a third nucleic acid encoding the light chain according to any of claims 13-48.

53. An expression vector composition comprising:
a) a first expression vector comprising the first nucleic acid of claim 52;
b) a second expression vector comprising the second nucleic acid of claim 52; and
c) a third expression vector comprising the third nucleic acid of claim 52; respectively.

54. A host cell comprising the expression vector composition of claim 53.

55. A method of making a heterodimeric antibody according to any of claims 13-48 comprising culturing the host cell of claim 54 under conditions wherein the heterodimeric antibody is expressed and recovering the heterodimeric antibody.

56. A method of treating a TSLPR-associated cancer in a patient in need thereof, comprising administering to the patient a bispecific antibody according to any of claims 1-12.

57. A method of treating a TSLPR-associated cancer in a patient in need thereof, comprising administering to the patient a bispecific antibody according to any of claims 13-48.

58. The method according to claim 56 or 57, wherein the TSLPR-associated cancer is a leukemia one of the following leukemias: an Acute Lymphoblastic Leukemia, a B-cell Acute Lymphoblastic Leukemia, or a Philadelphia chromosome-like B Cell Acute Lymphoblastic Leukemia.

59. An antibody or antigen-binding fragment thereof capable of binding to thymic stromal lymphopoietin receptor (TSLPR), wherein the antibody or antigen-binding fragment thereof comprises
a) a heavy chain variable region that comprises an amino acid sequence selected from the group consisting of SEQ ID NO: 13, 40, 41, 16, 64, 65, 19, 52, 53, and combinations thereof; an amino acid sequence selected from the group consisting of SEQ ID NO: 14, 42, 43, 17, 66, 67, 20, 54, 55, and combinations thereof; and an amino acid sequence selected from the group consisting of SEQ ID NO: 15, 44, 45, 18, 68, 69, 21, 56, 57, and combinations thereof; and
b) a light chain variable region that comprises an amino acid sequence selected from the group consisting of SEQ ID NO: 22, 46, 47, 25, 70, 71, 28, 58, 59 and combinations thereof; an amino acid sequence selected from the group consisting of SEQ ID NO: 23, 48, 49, 26, 72, 73, 29, 60, 61 and combinations thereof; and an amino acid sequence selected from the group consisting of SEQ ID NO: 24, 50, 51, 27, 74, 75, 30, 62, 63 and combinations thereof.

60. The antibody or antigen-binding fragment thereof of claim 59, wherein
a) the heavy chain variable region comprises an amino acid sequence having SEQ ID NO: 13, 14, and 15, and the light chain variable region comprises an amino acid sequence having SEQ ID NO: 22, 23, and 24;
b) the heavy chain variable region comprises an amino acid sequence having SEQ ID NO: 40, 42, and 44, and the light chain variable region comprises an amino acid sequence having SEQ ID NO: 46, 48, and 50;
c) the heavy chain variable region comprises an amino acid sequence having SEQ ID NO: 41, 43, and 45, and the light chain variable region comprises an amino acid sequence having SEQ ID NO: 47, 49, and 51;
d) the heavy chain variable region comprises an amino acid sequence having SEQ ID NO: 16, 17, and 18, and the light chain variable region comprises an amino acid sequence having SEQ ID NO: 25, 26, and 27;
e) the heavy chain variable region comprises an amino acid sequence having SEQ ID NO: 64, 66, and 68, and the light chain variable region comprises an amino acid sequence having SEQ ID NO: 70, 72, and 74;
f) the heavy chain variable region comprises an amino acid sequence having SEQ ID NO: 65, 67, and 69, and the light chain variable region comprises an amino acid sequence having SEQ ID NO: 71, 73, and 75;
g) the heavy chain variable region comprises an amino acid sequence having SEQ ID NO: 19, 20, and 21, and the light chain variable region comprises an amino acid sequence having SEQ ID NO: 28, 29, and 30;
h) the heavy chain variable region comprises an amino acid sequence having SEQ ID NO: 52, 54, and 56, and the light chain variable region comprises an amino acid sequence having SEQ ID NO: 58, 60, and 62; or
i) the heavy chain variable region comprises an amino acid sequence having SEQ ID NO: 53, 55, and 57, and the light chain variable region comprises an amino acid sequence having SEQ ID NO: 59, 61, and 63.

61. The antibody or antigen-binding fragment thereof of claim 59 or 60, comprising a heavy chain variable region (VH) and a light chain variable region (VL), wherein the VH comprises an amino acid sequence having at least 85%, at least 90%, at least 91% at least 92%, at least 93%, at least 94%, at least 95%, at least 96%, at least 97%, at least 98%, at least 99%, or at least 100% sequence identity to SEQ ID NO: 7 and the VL comprises an amino acid sequence having at least 85%, at least 90%, at least 91%, at least 92%, at least 93%, at least 94%, at least 95%, at least 96%, at least 97%, at least 98%, at least 99%, or at least 100% sequence identity to SEQ ID NO: 10.

62. The antibody or antigen-binding fragment thereof of claim 59 or 60, comprising a heavy chain variable region (VH) and a light chain variable region (VL), wherein the VH comprises an amino acid sequence having at least 85%, at least 90%, at least 91% at least 92%, at least 93%, at least 94%, at least 95%, at least 96%, at least 97%, at least 98%, at least 99%, or at least 100% sequence identity to SEQ ID NO: 8 and the VL comprises an amino acid sequence having at least 85%, at least 90%, at least 91%, at least 92%, at least 93%, at least 94%, at least 95%, at least 96%, at least 97%, at least 98%, at least 99%, or at least 100% sequence identity to SEQ ID NO: 11.

63. The antibody or antigen-binding fragment thereof of claim 59 or 60, comprising a heavy chain variable region (VH) and a light chain variable region (VL), wherein the VH comprises an amino acid sequence having at least 85%, at least 90%, at least 91% at least 92%, at least 93%, at least 94%, at least 95%, at least 96%, at least 97%, at least 98%, at least 99%, or at least 100% sequence identity to SEQ ID NO: 9 and the VL comprises an amino acid sequence having at least 85%, at least 90%, at least 91%, at least 92%, at least 93%, at least 94%, at least 95%, at least 96%, at least 97%, at least 98%, at least 99%, or at least 100% sequence identity to SEQ ID NO: 12.

64. An antibody or antigen-binding fragment thereof capable of binding to TSLPR, wherein the antibody or antigen-binding fragment thereof comprises:
a) a CDR H1, CDR H2, and CDR H3 comprising the CDR H1, CDR H2, and CDR H3 amino acid sequences of any one of SEQ ID NO: 7, SEQ ID NO: 8, SEQ ID NO: 9, or 76-93, and
b) a CDR L1, CDR L2, and CDR L3 comprising the CDR L1, CDR L2, and CDR L3 amino acid sequences of any one of SEQ ID NO: 10, SEQ ID NO: 11, SEQ ID NO: 12, 148-165, or 227-229.

65. The antibody or antigen-binding fragment thereof of claim 64, wherein the CDRs are the Kabat-defined CDRs, the AbM-defined CDRs, or the IMGT-defined CDRs.

66. The antibody or antigen-binding fragment thereof of any one of claims 59 to 65, wherein the heavy chain variable region comprises an amino acid sequence that is at least 80% identical to SEQ ID NO: 7, SEQ ID NO: 8, or SEQ ID NO: 9.

67. The antibody or antigen-binding fragment thereof of any one of claims 59 to 66, wherein the heavy chain variable region comprises an amino acid sequence that is at least 85% identical to SEQ ID NO: 7, SEQ ID NO: 8, or SEQ ID NO: 9.

68. The antibody or antigen-binding fragment thereof of any one of claims 59 to 67, wherein the heavy chain variable region comprises an amino acid sequence that is at least 90% identical to SEQ ID NO: 7, SEQ ID NO: 8, or SEQ ID NO: 9.

69. The antibody or antigen-binding fragment thereof of any one of claims 59 to 68, wherein the heavy chain variable region comprises an amino acid sequence that is at least 95% identical to SEQ ID NO: 7, SEQ ID NO: 8, or SEQ ID NO: 9.

70. The antibody or antigen-binding fragment thereof of any one of claims 59 to 69, wherein the heavy chain variable region comprises an amino acid sequence that is at least 98% identical to SEQ ID NO: 7, SEQ ID NO: 8, or SEQ ID NO: 9.

71. The antibody or antigen-binding fragment thereof of any one of claims 59 to 70, wherein the heavy chain variable region comprises an amino acid sequence that is at least 99% identical to SEQ ID NO: 7, SEQ ID NO: 8, or SEQ ID NO: 9.

72. The antibody or antigen-binding fragment thereof of any one of claims 59 to 71, wherein the heavy chain variable region comprises an amino acid sequence having SEQ ID NO: 7, SEQ ID NO: 8, or SEQ ID NO: 9.

73. The antibody or antigen-binding fragment thereof of any one of claims 59 to 72, wherein the light chain variable region comprises an amino acid sequence that is at least 80% identical to SEQ ID NO: 10, SEQ ID NO: 11, or SEQ ID NO: 12

74. The antibody or antigen-binding fragment thereof of any one of claims 59 to 73, wherein the light chain variable region comprises an amino acid sequence that is at least 85% identical to SEQ ID NO: 10, SEQ ID NO: 11, or SEQ ID NO: 12.

75. The antibody or antigen-binding fragment thereof of any one of claims 59 to 74, wherein the light chain variable region comprises an amino acid sequence that is at least 90% identical to SEQ ID NO: 10, SEQ ID NO: 11, or SEQ ID NO: 12.

76. The antibody or antigen-binding fragment thereof of any one of claims 59 to 75, wherein the light chain variable region comprises an amino acid sequence that is at least 95% identical to SEQ ID NO: 10, SEQ ID NO: 11, or SEQ ID NO: 12.

77. The antibody or antigen-binding fragment thereof of any one of claims 59 to 76, wherein the light chain variable region comprises an amino acid sequence that is at least 98% identical to SEQ ID NO: 10, SEQ ID NO: 11, or SEQ ID NO: 12.

78. The antibody or antigen-binding fragment thereof of any one of claims 59 to 77, wherein the light chain variable region comprises an amino acid sequence that is at least 99% identical to SEQ ID NO: 10, SEQ ID NO: 11, or SEQ ID NO: 12.

79. The antibody or antigen-binding fragment thereof of any one of claims 59 to 78, wherein the light chain variable region comprises an amino acid sequence having SEQ ID NO: 10, SEQ ID NO: 11, or SEQ ID NO: 12.

80. The antibody or antigen-binding fragment thereof of any one of claims 59 to 79, wherein the heavy chain variable region and the light chain variable region form an antigen-binding site for a thymic stromal lymphopoietin receptor.

81. The antibody or antigen-binding fragment thereof of any one of claims 59 to 80, wherein the antibody or antigen-binding fragment thereof is human, humanized, or chimeric.

82. The antibody or antigen-binding fragment thereof of any one of claims 59 to 81, wherein the antibody or antigen-binding fragment thereof is an IgG antibody.

83. The antibody or antigen-binding fragment thereof of claim 82, wherein the IgG antibody is an IgG1 antibody or an IgG4 antibody.

84. The antibody or antigen-binding fragment thereof of any one of claims 59 to 83, wherein said antibody is an antigen-binding fragment of an antibody.

85. The antigen-binding fragment of claim 84, wherein said fragment is selected from the group consisting of Fab, F(ab′) 2, Fv, scFv, scFv-Fc, dsFv and a single domain molecule.

86. The antigen-binding fragment of claim 85, wherein said fragment is a scFv.

87. The antigen-binding fragment of claim 85, wherein said fragment is a Fab.

88. The antigen-binding fragment of claim 85, wherein said fragment is an intrabody.

89. The antibody or antigen-binding fragment thereof of any one of claim 59-81 or 84-88, wherein said antigen-binding fragment is devoid of an Fc region.

90. The antibody or antigen-binding fragment thereof of any one of claim 59-81 or 84-89, comprising a VH and a VL on the same polypeptide chain.

91. The antibody or antigen-binding fragment thereof of claim 90, wherein the VH and VL are connected by a linker.

92. The antibody or antigen-binding fragment thereof of any one of claims 59-91, wherein the antibody or antigen-binding fragment thereof is conjugated to an agent selected from the group consisting of a therapeutic agent, a prodrug, a peptide, a protein, an enzyme, a virus, a lipid, a biological response modifier, a pharmaceutical agent, and PEG.

93. A bispecific binding protein comprising three chains:
a. a first chain comprising, in order from the N-terminus to the C-terminus, a heavy chain variable region and a heavy chain constant region;
b. a second chain comprising, in order from the N-terminus to the C-terminus, a light chain variable region and a light chain constant region; and
c. a third chain comprising, in order from the N-terminus to the C-terminus, a single chain variable fragment (scFv) and a heavy chain constant region;
wherein the scFv of the third chain, in order from the N-terminus to the C-terminus, comprises a heavy chain variable region and a light chain variable region or, in order from the N-terminus to the C-terminus, comprises a light chain variable region and a heavy chain variable region; wherein the heavy chain variable region of the third chain comprises an amino acid sequence that comprises SEQ ID NO: 1, 2, and 3 and the light chain variable region of the third chain comprises an amino acid sequence that comprises SEQ ID NO: 4, 5, and 6;
wherein the heavy chain variable region of the first chain and the heavy chain variable region of the third chain comprise different amino acid sequences and the light chain variable region of the second chain and the light chain variable region of the scFv of the third chain comprise different amino acid sequences;
wherein the heavy chain variable region of the first chain comprises an amino acid sequence selected from the group consisting of SEQ ID NO: 13, 40, 41, 16, 64, 65, 19, 52, 53, and combinations thereof; an amino acid sequence selected from the group consisting of SEQ ID NO: 14, 42, 43, 17, 66, 67, 20, 54, 55, and combinations thereof; and an amino acid sequence selected from the group consisting of SEQ ID NO: 15, 44, 45, 18, 68, 69, 21, 56, 57, and combinations thereof;
wherein the light chain variable region of the second chain comprises an amino acid sequence selected from the group consisting of SEQ ID NO: 22, 46, 47, 25, 70, 71, 28, 58, 59 and combinations thereof; an amino acid sequence selected from the group consisting of SEQ ID NO: 23, 48, 49, 26, 72, 73, 29, 60, 61 and combinations thereof; and an amino acid sequence selected from the group consisting of SEQ ID NO: 24, 50, 51, 27, 74, 75, 30, 62, 63 and combinations thereof; and
wherein the heavy chain constant region of the first chain comprises an amino acid sequence that is at least 90% identical to the heavy chain constant region of the third chain and wherein the heavy chain constant region of the first chain and the heavy chain constant region of the third chain dimerize.

94. The bispecific binding protein of claim 93, wherein
a. the heavy chain variable region of the first chain comprises an amino acid sequence having SEQ ID NO: 13, 14, and 15, and the light chain variable region of the second chain comprises an amino acid sequence having SEQ ID NO: 22, 23, and 24;
b. the heavy chain variable region of the first chain comprises an amino acid sequence having SEQ ID NO: 40, 42, and 44, and the light chain variable region of the second chain comprises an amino acid sequence having SEQ ID NO: 46, 48, and 50;
c. the heavy chain variable region of the first chain comprises an amino acid sequence having SEQ ID NO: 41, 43, and 45, and the light chain variable region of the second chain comprises an amino acid sequence having SEQ ID NO: 47, 49, and 51;
d. the heavy chain variable region of the first chain comprises an amino acid sequence having SEQ ID NO: 16, 17, and 18, and the light chain variable region of the second chain comprises an amino acid sequence having SEQ ID NO: 25, 26, and 27;
e. the heavy chain variable region of the first chain comprises an amino acid sequence having SEQ ID NO: 64, 66, and 68, and the light chain variable region of the second chain comprises an amino acid sequence having SEQ ID NO: 70, 72, and 74;
f. the heavy chain variable region of the first chain comprises an amino acid sequence having SEQ ID NO: 65, 67, and 69, and the light chain variable region of the second chain comprises an amino acid sequence having SEQ ID NO: 71, 73, and 75;
g. the heavy chain variable region of the first chain comprises an amino acid sequence having SEQ ID NO: 19, 20, and 21, and the light chain variable region of the second chain comprises an amino acid sequence having SEQ ID NO: 28, 29, and 30;
h. the heavy chain variable region of the first chain comprises an amino acid sequence having SEQ ID NO: 52, 54, and 56, and the light chain variable region of the second chain comprises an amino acid sequence having SEQ ID NO: 58, 60, and 62; or
i. the heavy chain variable region of the first chain comprises an amino acid sequence having SEQ ID NO: 53, 55, and 57, and the light chain variable region of the second chain comprises an amino acid sequence having SEQ ID NO: 59, 61, and 63.

95. The bispecific binding protein of any one of claim 93 or 94, wherein the heavy chain constant region of the first chain comprises a CH1 domain and a Fc region comprising CH2 and CH3 domains and the heavy chain constant region of the third chain comprises a CH1 domain and a Fc region comprising CH2 and CH3 domains.

96. The bispecific binding protein of any one of claims 93 to 95, wherein the heavy chain constant region of the first chain comprises an amino acid sequence that is at least 95% identical to the heavy chain constant region of the third chain.

97. The bispecific binding protein of any one of claims 93 to 96, wherein the heavy chain constant region of the first chain comprises an amino acid sequence that is at least 97% identical to the heavy chain constant region of the third chain.

98. The bispecific binding protein of any one of claims 93 to 97, wherein the heavy chain constant region of the first chain and the heavy chain constant region of the third chain are subject to at least one modification to reduce the formation of a homodimer.

99. The bispecific binding protein of any one of claims 95 to 98, wherein the at least one modification comprises substituting an amino acid residue at the interface of the Fc region of the first chain with an amino acid residue having a side chain with an opposite charge to a residue at the interface of the Fc region of the third chain.

100. The bispecific binding protein of claim 99, wherein the amino acid at the interface of the Fc region of the first chain is selected from a glutamic acid, a serine, and an aspartic acid.

101. The bispecific binding protein of claim 99, wherein the amino acid at the interface of the Fc region of the third chain is selected from a glutamine, a lysine, a leucine, and an asparagine.

102. The bispecific binding protein of any one of claims 93 to 101, wherein the heavy chain variable region of the first chain comprises an amino acid sequence that is at least 80% identical to SEQ ID NO: 7, SEQ ID NO: 8, or SEQ ID NO: 9.

103. The bispecific binding protein of any one of claims 93 to 102, wherein the heavy chain variable region of the first chain comprises an amino acid sequence that is at least 85% identical to SEQ ID NO: 7, SEQ ID NO: 8, or SEQ ID NO: 9.

104. The bispecific binding protein of any one of claims 93 to 103, wherein the heavy chain variable region of the first chain comprises an amino acid sequence that is at least 90% identical to SEQ ID NO: 7, SEQ ID NO: 8, or SEQ ID NO: 9.

105. The bispecific binding protein of any one of claims 93 to 104, wherein the heavy chain variable region of the first chain comprises an amino acid sequence that is at least 95% identical to SEQ ID NO: 7, SEQ ID NO: 8, or SEQ ID NO: 9.

106. The bispecific binding protein of any one of claims 93 to 105, wherein the heavy chain variable region of the first chain comprises an amino acid sequence having SEQ ID NO: 7, SEQ ID NO: 8, or SEQ ID NO: 9.

107. The bispecific binding protein of any one of claims 93 to 106, wherein the light chain variable region of the second chain comprises an amino acid sequence that is at least 80% identical to SEQ ID NO: 10, SEQ ID NO: 11, or SEQ ID NO: 12

108. The bispecific binding protein of any one of claims 93 to 107, wherein the light chain variable region of the second chain comprises an amino acid sequence that is at least 85% identical to SEQ ID NO: 10, SEQ ID NO: 11, or SEQ ID NO: 12.

109. The bispecific binding protein of any one of claims 93 to 108, wherein the light chain variable region of the second chain comprises an amino acid sequence that is at least 90% identical to SEQ ID NO: 10, SEQ ID NO: 11, or SEQ ID NO: 12.

110. The bispecific binding protein of any one of claims 93 to 109, wherein the light chain variable region of the second chain comprises an amino acid sequence that is at least 95% identical to SEQ ID NO: 10, SEQ ID NO: 11, or SEQ ID NO: 12.

111. The bispecific binding protein of any one of claims 93 to 110, wherein the light chain variable region of the second chain comprises an amino acid sequence that having SEQ ID NO: 10, SEQ ID NO: 11, or SEQ ID NO: 12.

112. The bispecific binding protein of any one of claims 93 to 111, wherein the heavy chain variable region of the first chain and the light chain variable region of the second chain form an antigen-binding site for a thymic stromal lymphopoietin receptor.

113. The bispecific binding protein of any one of claims 95 to 112, wherein the heavy chain constant region of the first chain further comprises a hinge region provided between the CH1 domain and the Fc region.

114. The bispecific binding protein of any one of claims 95 to 113, wherein the heavy chain constant region of the third chain further comprises a hinge region provided between the CH1 domain and the Fc region.

115. The bispecific binding protein of claim 114, wherein an intermolecular disulfide bond is provided between the hinge region of the first chain and the hinge region of the third chain by introducing cysteine at corresponding positions between the CH3 domain of the Fc region of the first chain and the CH3 domain of the Fc region of the third chain.

116. An isolated polynucleotide comprising a nucleic acid molecule encoding the VH or heavy chain of the antibody or antigen-binding fragment thereof of any one of claims 59-92.

117. An isolated polynucleotide comprising a nucleic acid molecule encoding the VL or light chain of the antibody or antigen-binding fragment thereof of any one of claims 59-92.

118. An isolated polynucleotide comprising a nucleic acid molecule encoding the bispecific binding protein receptor of any one of claims 93-115.

119. An isolated vector comprising the polynucleotide of any one of claims 116-118.

120. A host cell comprising the polynucleotide of any one of claims 116-118 or the vector of claim 62.

121. The host cell of claim 120, which is selected form the group consisting of CHO, HEK-293T, HeLa and BHK cells, optionally wherein the CHO cell is a CHO-K1SP cell.

122. A method of producing an antibody or antigen-binding fragment thereof capable of binding to TSLPR, the method comprising:
(a) culturing the cell of claim 63 or 64 in a cell culture under conditions which allow expression of the antibody or antigen-binding fragment thereof; and
(b) recovering the antibody or antigen-binding fragment thereof from said cell culture.

123. An antibody or antigen-binding fragment thereof obtainable by the method of claim 65.

124. A pharmaceutical composition comprising the antibody or antigen-binding fragment thereof of any one of claim 59-92 or 123, the bispecific binding protein of any one of claims 93-115 or a vector of claim 119 and a pharmaceutically acceptable excipient.

125. A method of treating a cancer in a subject in need thereof, the method comprising administering to the subject an effective amount of antibody or antigen-binding fragment thereof of any one of claim 59-92 or 123, the bispecific binding protein of any one of claims 93-115, or a vector of claim 119 or the pharmaceutical composition of claim 124.

126. The method of claim 125, wherein the cancer is leukemia.

127. The method of claim 126, wherein the leukemia is an Acute Lymphoblastic Leukemia, a B-cell Acute Lymphoblastic Leukemia, or a Philadelphia chromosome-like B Cell Acute Lymphoblastic Leukemia.

128. The method of claim 127, wherein the cancer overexpresses TSLPR.

129. The method of any one of claims 68-71, wherein the method further comprises administering to the subject an effective amount of an additional cancer therapy.

130. The method of claim 129, wherein the additional cancer therapy is selected from radiation therapy, surgery, chemotherapy, gene therapy, DNA therapy, viral therapy, RNA therapy, immunotherapy, bone marrow transplantation, nanotherapy, monoclonal antibody therapy, and a combination thereof.

131. The method of any one of claims 125-130, wherein the method further comprises:
a. performing a chemiluminescence immunoassay (CLIA) on cells of the subject to quantify TSLPR expression;
b. performing a genetic analysis including genome and/or transcriptome profiling to quantify genes and/or transcripts of Ph like B-ALL; or
c. both a and b.

132. A formulation comprising the antibody or antigen-binding fragment thereof of any one of claim 59-92 or 123, the bispecific binding protein of any one of claims 93-115 or a vector of claim 119.

133. A kit comprising comprising the antibody or antigen-binding fragment thereof of any one of 59-92 or 123, the bispecific binding protein of any one of claims 93-115 or a vector of claim 119.
